United States Patent Application Publication US 2024/0117295 A1 - sequence listing, part 2

SEQ ID NO: 3 - DNA, 3979104 bp, Artificial Sequence (residues 1,989,553-3,979,104 of 3,979,104)
  Synthetic E.coli genome
gccatacccgcgggaatgaaattctctttattcctgcgctgtttattctgtttagtcttggcggcgcggtatttggtatgggagaagaggccgtcgcctttgccattatcatcgcaccgctaatggtccggctgggctatgacagtattaccaccgtcctggtgacctatattgccacgcaaatcggttttgccagtagctggatgaacccgttttgtgtggtcgttgctcaggggattgccggcgttccggtgctttctggctccgggttgcgcatcgtggtgtgggttatcgccactctgattggcctgatctttaccatggtgtacgccagtcgagtgaaaaagaatcctcttctgagtcgcgtgcatgagtccgaccgcttctttcgtgaaaagcaggctgatgttgaacaacgtccgtttacctttggtgactggctggtattgattgtcctgaccgccgtaatggtctgggtgatttggggcgtgatcgttaatgcctggtttattccagaaattgccagccagttcttcaccatgggtctggtgattggcatcatcggcgttgttttccgccttaacggcatgacggttaataccatggctagttcctttaccgaaggggcgcgaatgatgatcgcccctgccctgctggtgggtttcgccaaagggattttgctgctggtcggtaatggtgaagcgggtgatgccagcgtgttaaataccatcctcaacagcattgccaatgccattagcggtctggacaacgcggtcgcggcctggtttatgttgctcttccaggcggtatttaatttcttcgtgacgtccggttctggtcaggcggcgttaaccatgccgttactggcaccgcttggcgatctggtcggtgttaaccgtcaggttaccgtgctggcgttccagtttggtgatggcttcagtcacatcatttacccaaccagtgcgagcttaatggcaacgctcggtgtgtgcagggtggacttccgtaactggctgaaggtgggcgcgaccctacttggactgctgtttattatgtccagcgtcgtagtgatcggcgctcagttgatgggctaccactaaaaatgttaagagccgcaattgcggctcttttttcattctgccgtttcagtctctacggcttcatttttggcattgcgcttcatccacaacgctagcgctttcaggctgtctggagtgaactcatcgcagcgtgcggtgatttcttccggcgtcagccagcaaacttcactgacttcatcttcctgtagtgcgaagggaccgtgagagacgcagctgaacaatgcgccccagacacggcaatttttatcttcgaaatagaactgcccgtgctcggcaaaggggacaccggcaatgcccaactcttcttccgcttcgcgacgcgcggattccagcagttgctcatcggcctggactacaccgcctgcggtcgcatctaacatgccgggtaaaaagtcttttgtctcggtacgacgctggaccagaattttgcccatgccatcatgcacgacgatgtaagttgcacgatgacgcagacactgtgcccgcatttgttcccggctggcttgtgcaatgacttcgttctcttcattgacaatatccacccattcagtacttgccaaacgacgctgttccattatcaggaaaccttctttttctggcgctcttacggcgcattttgagttgtgggtaaattacggattaatcgcgacctgcgcaatgatactttgatcattgagtgcgattacactaagtacgtcattatccagcatgccataactcgccggattaccgcctttcggaatactcacgctgccggggttgaagtggaaaatctccccccgctgttctgccactggcagatgggtatgaccgtacaccagcacatcgttctggtttaaagcaggcagattttccgggccaaaaagatgaccatgcgtcaaaaacagacgttgtttttccagtaatacctgttgccacggcgcggttatcgggaaatgcagcagcatttgatccacttcgctgtcgcagttgccgcgcacagcgataaccttatgtgccacttcattaagccgttcagcgactttggctggcgcgtaaccctccggtaaagcattacgcgggccgtgattcaacacgtcgccaaggatcaccagccactgggcaccgctttgggcaaacaactccagaacacgttccgtcgccggtaagctcccatgaatgtcgcttgcaaacatcagtttcatcactcactcctcgtcgaaaaaacgtaagctatgatactggattctgtcgttgctatcagccagattgcttcgcgctaagtgcaataaaacgctggacagacgctcgctgccactggaatgttgcataatccaccaggcgttctggcacctcatcgccatgtagtaccaggcggttaatcattagcgccagatcagtatcagcaatgcaccattcaccaaataaattcggctgacccagtactaacaaatgttctgccatcgcgaacagtttctctgcactggcttttccctcggccgttagtggcgcttttttcgcccccgcaaagacaacatccgtcggacgctcttcgcggatgggcatcagatcgctgcgcagccaggcctgaatctgtcgtgcacgcgcacgattttctaaatcaagcggataaatacgttcccaggtcggtggcgcaaatcgatcttccagatactccgcaatggcagaagattcactcaactcaaaatcatcgatttgtaataacggcacacggcgtgtctgaccgtaaccttgccacgtcggctgcaaatgttcaccgctgtcgaggtcgatggtcttgatatgaaagctcaggcctttttcctgcaacgccacccaggcggataacacataaggggagaaaaagtgggcatcactccaaagcgtgatagcgggtttactcattatgtcctcggcaataaagggggctggctatcaaactatagagcctttttgtcactgtcacgtgacgaatactcacgtaagtcgccgcgctttctatacttgtggtgttcagatgattaaacaaccggagctgcaatgatcgatctctatttcgccccgacacccaatggtcacaaaattacgctgtttctcgaagaagcagagctggattatcgcttgattaaggtagacctggggaaaggcggtcagtttcgtccggaatttttgcgcattagccccaacaacaaaattccggcaattgttgatcattctcctgccgatggcggcgaaccgctaagcctctttgagtctggtgccattttgttgtatctggctgagaaaacaggactctttttgagtcatgaaacgcgtgagcgcgccgccacattacagtggttattctggcaggtaggcggactggggccgatgcttgggcaaaatcatcattttaatcacgcagccccccaaaccattccttacgctattgaacgttatcaggttgaaactcagcgtctttaccatgtactgaacaagcggctggaaaacagcccctggctgggaggcgagaactacagcattgcggatattgcctgctggccgtgggttaatgcctggactcgccagcgaattgacctagcaatgtatccggcagtcaagaactggcatgagcggatccgtagccgccctgccaccgggcaggcactgctaaaagcacaactcggtgatgagcgtagcgatagttaacagaaacaggttctcgtgtattatttcatcctaagtaaaacaacggagaacctgcaatggcacaacctgccgctattattcgtataaagaaccttcgtttgcgtacgtttatcggaattaaggaagaagaaattaacaaccgtcaggatattgttatcaatgtgacgatccactaccccgccgataaagcgcgcactagcgaagatatcaacgatgcgctgaattatcgcaccgtaacgaaaaacattattcagcatgtagagaataaccgtttctctttgctggaaaaattaactcaggatgtgctcgatatcgcacgtgaacatcactgggtgacgtatgctgaagtggagatcgataaactgcacgcgctgcgctacgccgatagcgtatccatgaccttaagctggcagcgttaatcgccatatcgggaggctgcatgaacatagtgatcaccggagggacaggattaattggtcgccatttgattccgcgtttgctggagctgggccatcaaattacggtagtgacgcgtaacccgcagaaagccagttccgttctcggccctcgggtgacactatggcaagggcttgccgatcaaagcaacctcaacggcgttgatgcggtaatcaacctggccggagaaccgattgctgataaacgctggactcacgagcaaaaagagcgtctctgccaaagccgctggaatatcacgcaaaaactggtcgatttgattaatgccagcgacacgccaccgagcgtactcatttccggcagcgcaacgggctattatggtgacttaggtgaagtggtggttaccgaagaggaaccgccgcataacgaatttacccataaactctgcgctcgctgggaagaaattgcctgccgggcgcaaagtgacaaaacgcgagtgtgcctgctgcgtaccggtgtagtgctggcaccggatggcggtattctcggtaaaatgctgccgccgtttcgtcttggcctgggcgggccgattggctctggtcggcagtatctggcctggattcatattgatgatatggtcaacggtattctctggctgctggataacgagctgcgcgggccatttaatatggttagcccctacccggtacgcaatgaacaatttgcccatgcgctcggtcatgcgctgcatcgcccggccattttgcgcgtccccgcgaccgccattcgactgttaatgggcgaatctagtgtactggtattaggtggacaacgcgcgctgcctaaacggctggaagaagcgggttttgcgtttcgctggtacgatttagaagaggcgctggcggatgtcgttcgctgatgtggtttacagcaaacatccgccagttaactcccggtgttacaggattagtggctttgcgcgataagatcgtctggactaagtcgggtcaccatcataactaactctctgtctaaacctctatccagcatctcctgagcaatacgcagggcttcttcgtgtttgccctgcattgcgccttcttcacgtaatctgtcagcaatggtcatcagtttctccttttcttgtggtgcgcgttccgctatctcaccaataaatgcacgaaaacgctgggcatcccctgtttgtaatacgtaattaaacagggcttttagctgtctgtcattagtgttccctgtaactagcaggctaacaatttggtcgactaatcccaacagatcgcgctgacgaatatgtttctgaattaactccaacagcgccattttgcggtgttgcataatctcgtcatccggcaccacggtaatatccaccaacggaaaagcgctactatatattttgcgggctatagcaggctcggcaaattcatcaagccagcagagactataaggataaggacttctgcaaccatgataaaacagcatcgggagcaccaatggaagctctttatagcccgcatcaagatggttttgcattgccgcaatggaataacgcatcatgcgaaaagccattaattcttccggcttactttggtgctctatcactacataaatataacccactccctcctgcgttttcacagaccacaagaggtcggaataatattgccgcaggtcttcatcaataaaactgtttggttccagtttaagcgtcgttaaatcacacagtttgcgcagcggcgcgggaagatgaatatcaataaaatcccgcgcggtgtctggatggcgtaaaaaagatttaaataccgcatcatgcggcgtggaagttgtgcttattgtcatggcgttccgtcacccctcaaatttaagatgacgcgacaataaccacgattaacacccaatgcagcaggcagtttttatctttggacagcgaattcagaagtatttttagcggactgtaacttttacatttcagcggaagctgactcgcaaattccccatgaaaatactccggcagcgttagccaccggagaggaaattatttcaggcttcccttaaggaaccgttgcagacgagggctttgcgggttgccaaataactgctccggcgcgccctcttcttctattttcccctgatggaggaaaatgacatgagtagaaacatggcgagcaaagcccatttcgtgagtcactaccaccatggttttcccctcttctgccagttgctgcataatacgcaacacttcgcctaccagttcaggatcgagcgcgctggtaggttcatcaaacagtaaaacttccggttccatcgccagcgcccgcgcgatagaaacacgctgttgctgaccgccggaaagatgcaccggatatttcccctgcgcacgttcgtctatcccgacttttgccagatacttcaccgcccgctcgcgcgcttcctgcttgctcaggcccaacacctgaatcggcgcttccatgacgttttccagcaccgtcatatggctccagagattgaagtgctggaataccatcgtcaggcgtgtgcgcagtaagcgcagttgatttttatcggcgactttgagttgaccgtctttgtcgcgcaccagattgatcgtctggccattgaccacgatgctcccttcactcggtttttcgaggaagttaatgcagcgcagaaaggtacttttcccgcttccgctgcttccgatgatgcttattacatctccggcattcgcttgcagacttacccctttcagcacttcatgttcgccgtagcgtttgtgcaaatcgataacgtttaatttattctcggacatcgtattctcagtgcgtactagaaggtttcacatgctgcaaccagcgtttttccgctctgcgaaagaggctgatcaggacataagagatgattaaatagagcaccgcggcaatgccgaaggcggtaaaaggttgatacgtggcggcgttaatatcgcgggctattttcagcagatccggcaccgtggcagtaaatgccaacgcagtagagtgcagcatcaggatcacttcgttgctgtatgccggtaacgcaatacgcagcgcagaaggcaaaataatgcagcgatacattttaaaagtgctgaagccataggctctggcggcttcaatttccccatgcggaacgctacggattgccccagcaaaaatctcggtagtgtaagcgcaggtgttaagcgtcagcgccagcacggtacagttcaggccactgcggaagaaagcgttaaggaattcggttcccttaacaatctcaagcgtgtacatgccggaatagaacaccagcaactgaacatacagcggcgtaccgcgaaaaatataggtaaataaccagattggaaactggatgtatttattactggagacacgaccaatcgccagaaacagcgccaggactccgcctatcactacgctcaaaataagcagccacagagtgatcgccacaccagtaaagcgataaccgtcggtccacagcagcggtttccagtattcatgtaagatttcgatcacaggtcagccctcttcacacccacggagtagcggcgctcaaggaacagcagcacaccattggaaacagtggtgaaaaccaggtaaatcacgccacagacgatggcgaaatagaacggttcccaggtacttttgcctgccagttgggtggctttgaccacatcttccaggccgagtaagctaaccagtgcggtagatttgaggatcacctgccagttgttgccaatgcctggcagggcgtaacgcatcatgctcggaaacatgatccgccgaaacacttgcccacgagtaaaaccgaacgccgtcgccgcctctatatgtcctttcggcactgccataaaagcaccacggaacgtttcggtaaaataagcaccgtagataaaaccgagagtgataataccagcgaccatcggatcgatatcaatctgcccgacgcccatcgcctccgtcaccgtgtttagcgcaatctgcaaaccgtagaaaatcagcagcatcaacactaagtccggcacgccacgaatcagcgtggtgtacccttcgaaaatcagcccgctaagccgattttggctgagcttaccgccagcgccaattaaaccgatgattacagcgagcactacagagctgatagccagctccagcgtgacgagcgcaccctgtaaaataacaccactaaacccatacaacatgctgcctgtcctgtcgtgtgtggtgaattaccgcctcttgtctccctccggttacccgaagggagcgggctttctttcaccgatggcgattagccaccataaacatcaaaatcgaagtactttttcgctaatttctcgtaagtaccgtcagcgcgcatttcggcaaaggctttgttcagtgcttcgcgcagttcgttatcttctttacgcaggcccatgccggtccctacgccaaacagtttttcatctttaacagacgggccaccgaatttgtaatctttaccgacaggttgtttgaggaaaccttcgctggcagcgacctcatcctggaacgcggcatcaatacgtccggcagtcaggtcagaataaatgttgtcctgcccctgatagctgacgatttcaatgccttttggtgcccaatgttcattaccgaacgtctcctgggtggtgccctgcaatacgcctacccgtttgcctttcaggctctcgactgtcggctgaatgtcagaatttttcgccaccaccaaacgagaatcggcagcgtacagtttgtcggtgaaggctatttcttgctgacgtttttccgtaatggaaaggctactcatgatggcgtcaatcttcttcgcttttaaggacgggattaacgcatccagcggattttcgacaaacgtacattgcgtattgatgcgtttgcataattcctttgccagatcgatatcgaagccaaccagttcgccttgactatttttactttcaaatggcgcataggtcgggtcggtaccgatgcggatgttttgcggaatcgcagcaaacgccgcagttgcgctggagaaggccagaaccagagagaggcttagcaccagttttttcataatgtcctcaactgacagtctttttatagggaatatttacaggtttgttacacttatcgtgccataaaattgaccatcaaggcaaaatatcccgccccgttagacgtattatttttcattaaaaatgcttaagtatgcatttcaatgcaccacgatagtgcaacaaacctggcgtgcaccatgatgatcattccatcaggtacagcttcccagcgacgtatcagtcaccgtagacattaaagtcgaaatactttttcgccatcttgtcgtaggtgccgtcctgacgcagctcgccaagcgccttattgaaggcagccgtcagttcagcatcatctttacgtagccctacaccggtgccatcaccgaagtattttttgtcttttacactactgccagcaaaggcgaaatctttaccagcaggttgcttgaggaatccttcgctggcagcaacttcatcttgtaacgcagcatccagacgtcctgcagccagatcggaatagaccaaatcctggttggcataggccaccacatccacgcctttactacgccaggtctcgttagcgtaagcttcctgggtacttccctgcagcacaccaacatgtttacctttcagactatccagcgttggctgaatcggactacctttggccgcaatcaaacgagaatctgcggcgtacagcttgtcggagaaggcaatctcctgctgacgtttatcggtaatggaaaggctgctaataatagcgtcgatttttttcgctttcagactggggatcagcgcgtcaaagtcactggcaacccaggtacatttcacctgcatccgtttgcacatctcgttaccgagatcgatatcaaagccaacaaaatcacctttagcatctttgctactgaacggtgcgtaggtggtatcggttccgatacgtaccgtctccggtagcgccgcatagctggaagccgctgtggagagaccgactaacaaagacagagcgagaatgctcttcttcatacataaccctcaagtgaaaatggcttttttatgttgtgtattgtgttgtgtgtttgcaggctctttcatgcaggtcttatgccatcttgacgacaacagtaacattcaacgttaaatatgttaataagacgttgcattattgtcctgaagttgaagatagcaggtatagcggttgaatcgcagcgtttcgattgaatggcagaaacaaaatgtcgaggatttgatcgcggttgcaaaattgccctgaaacagggcaacagcggagttatgcgccctgccagcgggcaaagagatcttcaggaagggttatcgcaaactggtcaagaacacgattaaccgtctgatttatcacatcatcaagggattgcgggcgatgataaaacgccggaacgggaggcataatcaccgcaccgatttctgccgcctgagtcattaaacgcagatggcctaagtgcaatggtgtttcacgcacgcagagcaccaacgggcgacgctctttcagcaccacatctgccgcacgggtcagtaagccatcagtatagctatggacaatgccggaaagggttttgatactacagggtaaaatcaccatccccagcgtctggaaagaaccggaagagatgctggcggcaatatcgcgcgcatcgtgcgtgacatcggctaatgcctgcacttcgcgcagagaaaaatccgtttcgagggataaggtctggcgcgctgcctggctcatcaccagatgcgtttcgatatctgtgacatcgcgcagaacctgtaataagcgcacgccataaatcgcgccgctggcaccgctgatgcctacaatgagtcgtttcataaatagttgccctgtcagacttgcaggcagactttgcaggatttcggcgggagttgcaagtcagggtgccagaccggcaccctcagcgaaggcatcatccttcgttatgcatttcgagattttccacttcgttctgacgttgcactgctttggcgtcatcattacgtaacgtatcgaggaaatcgaggtagccctgatcaacatctttggtgacgtagacgccgttgaacacgctgcattcaaactgctggatatccggattttcagcgcgaacggcgtcgatcagatcgttcagatcctggaaaatcaacccgtcagcaccgatgatctggcgaatttcatcaacttcgcgaccgtgagcgatcagttccgtggcgctcggcatatcaataccataaacgttcgggaagcgaatttccggtgccgcagaagcgaggtacactttcttcgctccggcttcgcgtgccatctcgataatctgctcagaagtggtgccacggacgatggagtcgtcgaccagcaggacgtttttatcgcggaactcggcgcggttggcattcagtttacggcgcacggacttacgacgcagctgctggcccggcatgataaaggtgcggccaacatagcggtttttaacgaagccctggcggtacggtttgcccagaatacgagcaatttccagcgcgatatcacagctggtttctgggatcgggatcaccacgtcgatatccagatcttcccattcgcgggcaattttctcgcccagtttcgtgcccatattcacacgcgcgctgtaaacggaaattttgtcgataaagctgtccgggcgggcaaagtatacatactcaaacaggcacggattgctgaccggattgtcagcacattgacgggtaaacaactgcccttcttcagtgatgtaaatcgcttcgcccggcgcgacgtcacgcaggaaatcaaagcccagcgtatcgagcgctacgctttcggaagcgaccatatattctgtacggttctcgtcaatatcacgttttcccagtaccagcggacgaatcccgtttggatcgcggaaagcaaccataccgtggccgataatcatcgccacacaggcatacgcgccgcggattaagcggtttgtggcagcaatggcagcgaaaatattgtcggcttccagcgggtagtggcggaagttgtccagctcgctggcgaagatattaagcagaatttcgctgtcggaagtggtgttgatgtggcggcgtttttcttcaaacagttttttacgcaactcgtgagcgttggtcagattgccgttgtgggcaagcgtaatgccatacggggagttaacgtaaaacggctgcgcttcagaggcgctggagctgccagccgtggggtaacgcacatgaccaatgcccatattgccctgcaaacgctgcatatggcgagcttcaaatacatcgctcaccagcccgttcgctttacgcaaacggaagcagttattggcatctatggtgatgatgccggcggcatcctgaccgcgatgctgaagcaccgttaaggcatcataaatgctctggttaaccggcataacaccggcgataccgacaataccgcacatacgtctttttcctcgttaagccacatctcagagcacttacgctctgggcaagaaactactgctgctttgcagataatcaaaaaaacatctgatgataaaactgaattgcgggatcagctgacttttgctccagtcttcgcttttgctcaccccggtaaaggagtcgagaaagaagagaatggcagcaacaatcaacacaccgcgcaacgcaccgaaacagacgcccagcacccgatcggtgccactcaaccccgttttctccaccaactggcctatcacgaagttcacgatagcaccaacgatcagggtagcgataaacagtaccgcgatggcaatcccatttcgaaccagttcgtcttcaaagcccgtaaaccagacactcaggtaagtgtagtaatgactggcaacaaagaaagcacaaccccatgtcaccaggcttaacgcttcacgaacaaagccgcggatcaggctaaccagagaggaaaaagcaatcaccgcgattatggcgtaatcaatccagaccatatgtgtcccacgattttacgccctgtcatcctgttcggggcgcattctaacagaaaaagaaaacgtttgcgtagggatttccttcccgcgcatcaataaaaatggcgctgaaaaaatattcaacgccatcgactttttatgcctttgcggcatcgggcaatgcgtgtcggatgcggcgtaaacgccttatccgacctacggttctacccctgcgtaggcctgataagacgcgccagcgtcgcatcaggcaagaccgtattaattcggcgtatagcccattaccacgccacttaagccagaaagttgcttcaactcacccaggctacctttcagcttatctttgctggcatccggcccaaccagaatacgggtaattttaccctgcactggcgtggatgggctcgtataaacccgataaccggcaccgcgcagcttaccgacaatctcattcactttatcggcatttttcagcgcacccagttgcacaacataggctttacccgtcggtgcagctttttcttccacgaccggcttcggttctggcttcggcgcaggtggtgcttcaacctttggtttaggcggctccaccggtttcggcttcggtggggcgaccggtgcaggttccggttcaaactcggtgttattggctgcaatagtggccggatcgaggctcggtgctgcggcatcacctgcccgcacctcttccgctgcgccttccggcggctgcgtcggtaacgcctgggtggcggctggcatcatatcaggctcatcacgatcgcccgctttcggcaccagcgggatagccgcgaactcatcctgataatgttttttctgcccgtccagcagccctggaagtacaatcacccccagcgccaccagcacgatcgtgcccactaaccgattctgaaacttacttgccaccgcttctcctcgcgtcaatcacttccatgacatgtgcgaccgtgtggaaagaaccacacaccagcacggtgtcttccgctttagcgtccgccattgcggcatcccatgcctgcgcaacgctatcaaaacttttgccgttacccaaatgctcaagcagttgttctgccgtggcaccgcgcggcccttccagtggcgcacaataccagtcatcaaccacgcttttcaaccaggccagagttccggcaatatctttatcatgtagcataccgataaccgccagcacgcgcccgtttttcggtagcgctttcatacgcccggtgagatattccgccgcatgtggattatgcgcgacatcaaaaataacgcgtgggctctcgctcacaatctggaaacgtcccggcaaaattgcgctggcaatcccgtcgcgaatggcattttcactgacttccagcccgctggcacgcagtgccgccagcgctgttgcggcattcggttgcgggacaagcggcaacggcagattttccagcgtgccgtgagcatcgctaaacgcccagtcatgatcggtgacggaatagttccactcaacgccccgacgttgtaacagtgcacctttttcctgcgccacatcagcaatggtagaaggcatttccggctcaccgacaattgccggtttttcgctgcggaagatgcctgctttctcgcgaccaatactttcgcgatctggacccagccagtcggtatgatccagcgcaatactggttactaccgcgacatcggcgtcgacaatattggttgcgtccagacgaccgcccagccctacttccagaatcaccacgtcaagttgtgcctgcttgaacagccacaacgcgctcagcgtaccgtactcgaaataggtcagggaaatatcaccgcgtgcgctttcaatctccgcaaaagaggcggtgtgggcgctttccggcaattcctggccctgcacacgtacgcgctcggtataacgcaccagatgagggctactgtagacgcccactttgtaccctgccgccatcagaatgctctccagcgtacggcaggtggtgcctttgccattcgtacccgcaacggtaaacacaaatggcgctggtttcaggacgccaagacgcgccgcgaccaggctcacgcgctcaaggccgagatcgatagttttactgtgcaggttttccagataagaaagccagctagccagagggctcgcggcttgaggagtgcgtttgataatcatggtatccgctgattcgttacggtgagaatagcaaaagggcagagccagtggccctgcccttatcagttatcaggcctcaggttcctgatccggtaccgggggtaccactacgccttcacgcggcgcttcaggattcggcgctggcagattcatcaacttcgccagaatgctcgccagtttcaggcgcatttccggacgacggacgatcatgtcgatcgcgcctttctcgatcaggaattcactgcgctggaatccaggcggcagtttttcgcgaacggtctgttcgataacacgcggaccggcaaagccgattaacgctttcggttcagcgatgttgagatcgcccagcatggcgaaacttgcagaaacaccgcccatcgtcgggtcggtcagcacggagatgtacggcaagccgcgctcctgcatttttgccagtgccgcagaggttttcgccatctgcatcaggctcatcagtgcttcctgcatacgtgcgccaccagaggcggagaagcagatcagcgggcagttatcttccagcgcctgctcaacggcacgcacgaaacgtgcacccacaacagaccccatactaccgcccataaaggcgaactcgaatgccgcagcgacaaccggcattccatacagagtgcctttcatcaccaccagcgcatctttttcgccggtttctttctgcgcagatgccagacggtctttatacttcttggagtcacgaaacttcagcacatctttcggctcaagctcgctacccagctccacaaggcttccttcatctaacaggctatgcaggcgattacgcgctgtcatacgcatgtgatggtcacacttcggacagacctcaagattacgttccagctcagcgcggtataaaacctgaccgcagctatcacacttagtccacaccccttcaggaatgctcgccttgcgggtgggagtaatgttgcttttaattcgttcaatccagctcattagggacctttctgtctgaacctggttcgatgccagttttatctttggggacgcataatgccatttttgcccccaacagaccatgaatgttgcacattaaaacataacagcccgaaactttggataaaaaagtggtcgaaccgcggagttactttttattttgcggcgcgtgccgcagcgcgtttgtgacggattatttcgatgacgcccggcaaaatagaaaccacaataatcccgacgatcagcagcttaaggttatcctgaaccatcgggattgtaccgaagaaatagcctgcgtaggtaaaaagcagtacccacaacagtgcgccgatcacgttataagcggcgaaatgacggtagctcatgtggcccattcccgcaacaaacggggcgaacgttctgacgatcggcacaaaacgggcgagaataatcgttttgccgccatgtttctcataaaactgatgggttttgtcgagataactgcgacggaaaattttgctattgggattactgaacaacttttcaccgaacaaccgcccgatagtgtaattgaccgcgtcacccacaatcgcggcgatcagcatcagcaccaccatcatatggacgttgagatcgttggtttccagacttgccaacgctccggcaacaaacagcaaactatcacccggtaaaaacggcgttaccaccagaccggtttcacagaacaaaattaagaacaaaatggcataaacccagacgccgtactccgcgaccagctctgccagatgcacgtcaatgtgcaggataaaatcgatgaggaaataaatcaggtccatatttgcctatgccttgtactcgtcatctttcaggctgtaactacgttggctacagcctgaaatgttccgagcattattctcgttagtccgccagaaatagcgggcccattggcggttttggaagatcataccggtcagggtaatccaccgcgaccagatacagcccttccgcttttgccgttgctgccgccagcgttctgtcctttgccgccagcaactctgctatccagctctccggctggttgtgggcaccgacttccatcaggctgccgacaatattcctgaccatatgatgtacaaaagcattcgctttaatatctaccaccacataaggaccgtgacgcgtgacattaatatgcataacgttgcgccacggggttcgggactggcactgcaccgcacggaagctggtgaaatcattctcgcccagcaagcattgcgcagcccgatgcatccgttcagcgtccagcggttcgtaaaaatgggttacccctttactcagtaccgccgggcgcagccgatgattgtagatgatgtagcgataacggcgagccgtggcgctaaatcgggcatgaaaatcatcaggtacagttttaacccaacgcacagcgatgtcaccaggtaaattcgcatttacgcccaaggtccacgccgcgtctttgcgcagcgcggttgtttcgaaatgcacaacctgcccggtaccgtgtacccctgcgtcagtacgcccggcgcagaagacggtgatgggttcgttcgccacctgggagagcgccttttccagcttctcctgcacactgcggacttcgttctgccgttgccagccgtaatacttactgccgtcgtactcaatgcccagcgcaattttataaactggcggttgttgctggtcggacattagtacagatactcctgcaccagtttctcggcgatttttactgccatcagcgcgccgccaaagcgaacgttatcggccacgctccagaactggacttgctccggcataccgtagtcattacgcacgcagccaacagaaagatgcggcgtaccgctagcatcacctacctgagttgggaattcgttctcttcagagagcacaatatcttcgccttgaacaaacgcatcacgcgcttcttctgctgccagtggacgcagagcttcaaagttgaccatctgggcatgaccgtagaataccggtgcctggacgacgctagcgctaatcatcagcccttcgtcctgcaggattttgcgtacttcgtcaacgatacgacgttcttcacgcacgctaccttcgctatccggcagtaacggcagcatgttgaacgccagctgacgcccgaagaaatcttcttcgtcaatcggaatgccgttgagcaatttcgcactctgccccgctaacgcatcgaccgcttttttgccctgggcggaggcactaatcaggctggtaacgctgatacgacttaaaccgccctgatcgattaacggtttcagtgccgccagcagctggctggtcagactgtctggtacggcgatgacattccggttccggtaatctgtcagtacaaacgggtttacttccggcaccaccagcggtacgtcgggttcgagagcaaacaatccactgctgtcgatcaccaggcaaccactgttggtcgcttcttcaacccaggcagcggtagcttctttgcctgcgacaaaaaatgccagctgcgcctgcgtccagtcgaattcagcggcatcctgcacggtgattgtcttaccaccaaagcgcagttgttcgcctgcgctttcgttacgtgccagtgcataaatttccccaaccgggaactgacgttcagccagcgtttcaagcagggcttcgcccacagcgccagttgcgcccaggacggcaatgttccagccttcagacatggtggtttactccagaaatagcaaagctccctgccaatgttacagcagagagcatgaagaagagattaacgtgccggatgatgaacggcgttaaaacccagtttacacagcaaacttgccgcactggcgtcatcacaaattacatacagagaactccattcacggcgctcaagatagtttttgcgcagtttatcgaactcacccggtatcccggcgactttacgcagcggtgcgtcatcgcggcgcacatcatacaccaaatgcaccagccttttcagcgtcggttgatcgagcgggccatgcagcgtaatgcgaccaaactctggcgcaggcagtaatgtatccagcgcaacgtgctgttcatgcccaataaacttgctataagcttcaaacacttgcgtagtaccgcgtgctttaccttccagggtatagcctgcgatatggctcgtgccgatatccacttttttcagcagctcgacgttgagttccggttcgccttcccagacatccagcactacgcttaacttctggccttcattcaggcaggtcagcaacgcagtattatcgacgactgcgccacggcaggcgttaatcagaatcgctccgggcttcaggctacggatcagtttttcatccgccagatgtagcgttttgtacggaccatctttaaagagtggcgtatggaaagtcagaatatccgcgcgctggactaactcatccaggctgcggaaatcaccctcatccccacggtcggcgcgaggcggatcgcaaagtaaggttttaatccctaacgcttccagtcgcgcctgcaatcgacgtccaacgttaccaacgcccacgatccccaccgtacggtcgtacagactaaatccatcgcgttcggcaagcatcagcagggaggagaaaacatattccaccaccgcaatcgcattacagccaggtgcagcggaaaaaccaattcccgcctgcttcaaccatgcttcatcgacatggtcggtccccgcagtggcagtgccaacaaatttaatgggttttcctgccagcaaagattcattcactttcgtgacgctacgcaccatcagcgcatccgcgtctgccagttgagcgacggggattggacgcccgggaaccgcggtcacctcacccaaacggctaaataagtcgcgggcataaggcatattttcatcaacaaggattttcacgtttgtgttacctgtatgagacgagagttaaccggacaagtgtgccataatctcgcggccaggcatacttgcgaagatttcaggtataaggatacgtaatgatacaacctatttccggccctcctcctgggcaaccaccaggtcagggagataatctgccgtctggcacgggcaatcagcctttatccagtcagcaacgtactagcctggaaagcttaatgacgaaagtgaccagtctgacgcaacagcaaagagcagaactgtgggcgggtatcaggcacgatattggtctgagcggagatagtccgctgcttagccgtcacttccctgccgctgagcataatctggcgcaacgtctgctggccgcgcaaaaaagccattctgcccgccagcttttagcgcaattaggggagtatttacgtctggggaataatcgtcaggcggtcacggattatatccgtcataactttggtcagacgccgctgaatcagctcagtccggagcaattaaaaaccattctcaccctgttgcaggaagggaagatggttattccgcaaccacagcagcgcgaggcgaccgaccgtcctttattaccggcggagcacaatgcgctaaaacagctggtgaccaaacttgcggcggcaacgggggaacccagcaaacagatctggcaaagcatgctggaactttccggggtgaaagatggcgagttaattccagcgaaactgtttaaccatctggtgacctggctacaggcgcgtcagacgctaagccagcaaaatacgccgacgctggaaagtctacagatgacgctaaaacaacctttagatgccagtgaactggcggcgttaagcgcatatatccagcaaaaatatggtctttctgcgcaaagtagcctttcttctgcccaggccgaggatattcttaatcagctttatcaacggcgggttaaagggattgatccgcgtgttatgcaaccgctgcttaatccttttccaccgatgatggacacgttgcaaaatatggcaacgcgtcccgcgctgtggatactgttagtcgcgattatcctgatgctggtctggctggttcgttaaccccgacgaaaactcagtatcgtgacaataatacccagcaccgcagagatcgccccggcaagaaatacgctagagtaaccaaacgtggtcgccagcattcccgccagcggcccggagacgccgagggcgatatcctgaaacgcggcgtaaccgcccagtgcggtgccgcgaacttgactggggacgcgtttaaccacctccacgcccagcgcaggaaagataaggctacatccggctccggttaacgccgcgcccgctaatgcgacccatgcacctggggcttgccagagcagcaacaagcccaccgtttctacaagcagagagacaatcgccactttcacgccgccaaaacggtccggcatccagccaaacatgacgcgcatcacgacaaatgcgccgccaaacgcggtaagagtaaagcccgccatcgcccatcctttgctggcaaagtagaggctaacgaaagtcccgataacagcaaaaccaacgccttgtagtgccagacctaaccctggtttccagataagcccgacaacgctccacaggcttggacgttctcccgccagggccggtactttgcgcactgtgccgttacaggcccacgccagtacgggtaataccattgtggtgatcgccagtgcggcaaaaccgtaatggctatgaatcaacaggccaagcggagcaccaacagcgagggcaccgtaaatcgccattccgttccaactcatcactttgccagagtgttttggccctacgatgcctagtccccaggtcagagcgcctgtcagtaactggctttcaccaaagccaagaatcaaacgcccgacgaccaacagagcaaatttgaacggtgcggagacaggcaaaatcgccgccagcagcaacgcgccgccagccagaccacaagctaacattccctgaagcgcgctacgttttgcaccatattgatcggccagtcgcccggcgtaaccacgcgtcagcaccgtagccagaaactgaatcccgacggcaatgccgaccatggtattgccatagcccagttcatgatgaacaaacagcgggataaccggcaacggcaaccctacggtcatgtaggtgagaaaaaccgcaaaagcgatgcggaagaggctaaaattggcagaagatcgtgtttcggtttggcttacagcagtcatgcattactccagaatgcagcgcaaggcgaggagtatccccgtctcatctctctggtttcagggttacggtgcgttggcaggatttaacgcgtacgtcttttcagaaggaaatcgacaaagcgggaagtttgcctggaactggcggcgattgtcaatgatgtgaaaaagggaaccatcaggttcccttttgcgttagtgccggaggccgcattggcgcgtaacgtcggatgcgacgctggcgcgtctactccgacctactgcgaattaatctttcagcttgcgcattaccagcgtggcgttggtgccgccgaagccgaagctgttagacataacggtggtcagttcgcgatcggtcgtttcggtcacgatgttcagacccgcagcctgctcgtccagctcttcaatgttgatgctcggggcgataaagccgtgttccagcatcagcagagagtagatagcttcctgtacgccagcagcgcccagagagtgaccggtcatggctttggttgcagaaatcgccgggctcttatcgccgaacacttcacggatagctgccagctctttcacgtcgccaaccggagtgctagtaccgtgggagttcaggtaatcgattggggtatcaacgccatgcatcgccatcttcatgcagcgtactgcgccttcgccagacggagcaaccatgtctgcaccatcagaggttgcgccgtagccaacgatttcagcatagatgtgagcaccacgcgccagcgcgtgttccagctcttcaaccactaccataccgccgccgccagcgataacgaaaccgtcacggtgagcgtcgtaagtacgggaggctttttccggggtgtcgttgtatttagtagacagcgcacccattgcgtcgaattcgcaagccatttcccagcacagctcttcgccgccgccagcaaacacgatgtcctgtttgcccagttggatctgctctactgcgttaccgatacagtgtgcggaagtcgcacacgcggagctgatggagtagttaacgccatgaattttaaacggggtggcgaggcaggcagaaacgccggatgccatcgctttggtgaccacatacgggccaaccgctttcaggccgcgcgggccgcgcattgcgtcagcgccgaacacctggaaacgcggggagccgccgccggaacctgcaatcaggccaacgcgcgggttattctggtaagcttccggagagaggcccgcatcagcgattgcctgctccatagaaaggaatgcataaatggatgcgtcgctcataaagcgcacaactttgcggtcaatgaggccagtggtatccagttttacgttgccccagacgtggctacgcatgccggaatccttcagctcctgagagaaagtgatcccactacgtccttcacgcagagatgccaggacttcctgctggttattaccgatgctggaaacaatgcccaggccagtaatcactgcacgtttcattcaatacctctgtaagtcgcacatagagtaagtttcgaatgcacaatagcgtacacttgtacgccgaacaagtccgatcagccatttaatagagaaatttgcgcagccttacacacatcgctaagatcgagccaccgcctgtaagacgagtaacttacgtgaaacactactccatacaacctgccaacctcgaatttaatgctgagggtacacctgtttcccgagattttgacgatgtctatttttccaacgataacgggctggaagagacgcgttatgtttttctgggaggcaaccaattagaggtacgctttcctgagcatccacatcctctgtttgtggtagcagagagcggcttcggcaccggattaaacttcctgacgctatggcaggcatttgatcagtttcgcgaagcgcatccgcaagcgcaattacaacgcttacatttcattagttttgagaaatttcccctcacccgtgcggatttagccttagcgcatcaacactggccggaactggctccgtgggcagaacaacttcaggcgcagtggccaatgcccttgcccggttgccatcgtttattgctcgatgaaggccgcgtgacgctggatttatggtttggcgatattaacgaactgaccagccaactggacgatagcctaaatcaaaaagtagatgcctggtttctggacggctttgcgccagcgaaaaacccggatatgtggacgcaaaatctgtttaacgccatggcaaggttggcgcgtccgggcggcacgctggcgacatttacgtctgccggttttgtccgccgcggtttgcaggacgccggattcacgatgcaaaaacgtaagggctttgggcgcaaacgggaaatgctttgcggggtgatggaacagacattaccgctcccctgctccgcgccgtggtttaaccgcacgggcagcagcaaacgggaagcggcgattatcggcggtggtattgccagcgcgttgttgagcctggcgctattacggcgcggctggcaggtaacgctttattgcgcggatgaggcccccgcactgggtgcttccggcaatcgccagggggcgctgtatccgttattaagcaaacacgatgaggcgctaaaccgctttttctctaatgcgtttacttttgctcgtcggttttacgaccaattacccgttaaatttgatcatgactggtgcggcgtcacgcagttaggctgggatgagaaaagccagcataaaatcgcacagatgttgagtatggatttacccgcagaactggctgtagccgttgaggcaaatgcggttgaacaaattacgggcgttgcgacaaattgcagcggcattacttatccgcaaggtggttggctgtgcccagcagaactgacccgtaatgtgctggaactggcgcaacagcagggtttgcagatttattatcaatatcagttacagaatttatcccgtaaggatgactgttggttgttgaattttgcaggagatcagcaagcaacacacagcgtagtggtactggcgaacgggcatcaaatcagccgattcagccaaacgagcactctcccggtgtatagcgttgccgggcaggtcagccatattccgacaacgccggaattggcagagctgaagcaggtgctgtgctatgacggttatctcacgccacaaaatccggcgaatcaacatcattgtattggtgccagttatcatcgcggcagcgaagatacggcgtacagtgaggacgatcagcagcagaatcgccagcggttgattgattgtttcccgcaggcacagtgggcaaaagaggttgatgtcagtgataaagaggcgcgctgcggtgtgcgttgtgccacccgcgatcatctgccaatggtaggcaatgttcccgattatgaggcaacactcgtggaatatgcgagcttggcggagcagaaagatgaggcggtaagcgcgccggtttttgacgatctctttatgtttgcggctttaggttctcgcggtttgtgttctgccccgctgtgtgccgagattctggcggcgcagatgagcgacgaaccgattccgatggatgccagtacgctggcggcgttaaacccgaatcggttatgggtgcggaaattgttgaagggtaaagcggttaaggcggggtaatctgctctcgcagtgtttgccggatgcggcgtgaacgccttatccgacctacgtgtgacgtgtaggcctgataagacgcgataagcgtcgcatcaggcatgctgctccagacgccgcaacttactgctgactcgcctgctgaaacaggttttcccacatatcggtcaccagcgcctggtcacgcgggctcaattcaccagcaccaatggctttttccagactctggctaacggtcgtatgcaccgcctgagcggagtggtcatcaccactttccagttctgcgatggctaatgtcaggtggccacgcaaatacccactggcaaacaactcatcatcactggcatggtcaaccataccgtcgattaatgccagaatgcgactttcaaactccgcgatcatcttctttcctcattgtaaaacgtggcgctggcttcagttgagcgcttccggccacgggaactgttccgccgtaagttccggcgtgtgataataattttgtagtgctttaatgaagcgtgccggacgttccggaatgccatttgtcagataatccatcacctgcgcatgtactcgccgttgaaacaccacacgatccggttcgaaatccccttccagattgtcgcaactgacgttaaacggatatcccgccgccacacagaacaaccagtcgagcgcctgcggcttcacttcaacatcttcaaactggctttgcgtttgggcatcgcgtccgtccgggcaataccagtagccgaaatcaaccagctcacggcgcgctttcccggcaatacaccagtggctaatctcatgaattgcgctggcataaaagccatgagcaaagacgattcggttatacggtacttccgcatcagcaggaagatagatcggttcgtcgtcgcctttaatcagacgggtattaaaatcatcggcaaagcagctattaaaaatttcaatcaactgctcgtagtggtgtgtactgttcattagttcatccccaaccagtggaggatctcctgtccgtggctgtcgtaaagtaatttggcactcatcaccgcgctgacgataacaatcatcgggcggatcagcttttgtcctttgctcaacaccagtcgactacccatgcgcgcgccgaggaactgccccaccagcatgacaaagcccgtcgcccaaatcactttgccgccgagaataaacagcagtaaaccgccgatgttactcgttgcgttgagtaatttggcgtgagccgtggctttggcgaggttaaatccgcacagcgtaacgaaggccagcgcgtaaaagctcccggcagccgggccaaagaatccatcataaaaaccgacgcagccaccggctattaacgcgaagggtaaaccgtacatccggcgctggcggtcttcttcacctagctttggcatcagcaagaaatagaggccgatacaaattaccagaatgggcaaaatctgccgtaagacatcagcctgaacgtattgcaccagcagtgcgccgctcatactgccgacaaaggtcatggcgatattgagtttctgatcgcttaaactaaccactttgcggcgaataaagtagatagtagcggaaatagagccgccgcaggcttgcagtttattggttgccagcgcattagcgggagacatccccgctgccatcaatgccggaatggtgagtaacccaccgccaccggcaatgctgtcgataaatcccgccagcatggcgacaaaaaagagaactcccagcaacagcggggaaaccataaacaggctattaaacgtttccattagatcacgtgctcatccagtagcgcctggcaggaaggcggcaacggaggcggtgtcttcttctcaggctttgttgttcccggttttggaggttcaaaccagctttgcagttctgccccgcaaccatcgccacttggcggtaaaggttgatcttcacactccagactatcggcagggcaacgtaatcgtacatgcatatgcgcgcgatgctggaaccagggtcgcactttgcgcaaccagtcgcgatcggtgcccgcatcaaggcaaagttgttgtttaatcgccggattaacaaaaatgcgcgtgacgtctttgtcctgggcggcgagtttgatcaagctgaaaatttctggcttccacagcgtggagacaacgtgtttaccgtcgcgggaaactaagtccagtgcttgcgggcgcaagagctgcgcggaggtccagcgagttttcggcagttgcagaaagatatcgacatccagtccggtctggtggctggcatgaccgccgttgaaacgcccaccagcgggcatccccatatcgccaatcagcaccgtacccatgcccagattgctcacctggctactcagacgctggataaacatcaccagatccgggtgaccgaaatagcgacgctgatcggtacgcatgacctgataatgttcggactgtatcggcagcgtgtcagcgccgacaatacagccattagaaaaactgcctatgctttgtgcgctacccggcacaggttgggttattttttgccacggcgtcgctgccaggctggcgctactggcaagcagagccagcagcgcaatcgcggttttattcattttttaccagcgtggaatatcagtcttcacatcggcattttgcgcccgttgccgtaacaggtgatccattaaaacgatcgccagcatcgcttctgcgatcggcactgcgcggatcccgacacagggatcgtgacggcctttggtgatcatctcaacttcttcgccaaagcggttaatggtacgacccggcacggtaatgctggaggtcggtttcagcgccatatgggcaatgatttgctgcccgctgctgataccgccgagaatgccgcccgcatggttgctctggaaaccgtctttggtgatttcatcgcggttctggctgccgcgcagcgccaccacgtcaaagccgtcgccaatttccacgcctttcaccgcgttgatgctcatcagcgcatgggcgatgtcagcatccaggcggtcaaagaccggctcgccaagtccggcaggaacgccactggcaacaacggtgactttagcgccgatggagtcgccctcttttttcagcgcacgcatcaactcgtctaacgcgtcgattttgtcggggtccgggcaaaaaaacggattttgctcgacctggctccagtctttgatatccagcggaatgtcgcccatctgggtcaggcagccacggatttcaataccaaatttctcggcgagatattttttggcaatagctcctgccgccacgcgcatggcggtttcgcgggcggaagaacgtccaccgccgcgataatcgcgcagaccgtatttttgttcgtaggtgtaatcggcatggcctggacggaaaacgtccttaatcgcactgtaatcctgagagcgctggtcagtgttttcgatcaacaagccaatgctggtgccggtagtaacgccttcaaaaacaccggagagaattttgacctgatccggctcgcggcgctgggtggtatagcggcttgtcccagggcgacgacggtcgaggtcatgttgcaggtccgcttccgtcagcggaatgcctggcggaacaccatcgacgatgcagccgagcgccagcccgtggctttcgccgaaggtggttacgcgaaagagttgtccaattgtgtttccagccatcacggctccgttattgttgtgtttgcgtgtttacttaatctttataaatcgcgaaatgttctcgtgcggcaataagctgctctttggtgagcataaacacaccatcgccgccgttatcaaactccagccaggtgaacggaacatccggatattgttccataagatgtaccatgctgttgccgacttcacaaatcaacacgccatcatcagcaaggtaatctgccgcgttaccgagaatgcgacgcgtcagtttcaggccgtcagtgccagatgccaggcccagttccggctcgtggcggtattcgtttggcaggtcggacatatcttccgcatcgacatacggcgggttagtgacaatcaggtcgtactgcactttcggcaagtcgcggaacagatcggaacgaatcggaatgacgttgtggatcagaccgtgttcttcgatgttctgttcagcaaccgccagcgcgtctggagagatatccaccgcgtcgacttctgcatccgggaaggcataagcacaggcaatggcgatgcagccgctaccagtacacatatctaaaatatgctgcggttgcttgctgataagtccggcaaatttattgttgatcagttcaccaatcgggctgcgcggcaccagcacgcgttcatcgacgtaaaattcatggccgcagaaccacgctttgttggtcaggtaagccaccggaatgcgttcattgacgcggcggatcacgcgttcaacaatacggtgtttttcgctggaggtcagacgcgcggtgcgcatatcttccggaatatccagcggcaggtagaggctaggcaacaccagctgtacggcttcatcccacgggttatcggtaccgtgaccgtaccagatatttgccgcgctgaagcggctcacgctccagcgcaacatgtcctgaatggtttgcagctcatttactgcttcatcaacgaaaattttatccacgtattcctccagggcatgatcgcaataatttcggcggctagtttgccatgaagatgacgataaatcagcattcacgcgcggtgagtgaggaaaaatacgtttaaaacgatcgattgcgctacgagtcgggtaaactgtaggaaaattagaaatagagacagataaatgaaaaagaaaacaacacttagcgaggaggaccaggctctgtttcgccagttgatggcggggactcgcaagattaagcaggacacgattgtccaccgaccgcagcgtaaaaaaatcagcgaagtgccggtgaaacgcttgatccaggagcaggctgatgccagccattatttctccgatgagtttcagccgttattaaataccgaaggtccggtgaaatatgttcgcccggatgtcagccattttgaggcgaagaaactgcgccgtggcgattatagcccggagttgtttttggatttacacggtctgacgcagctgcaggccaagcaggaactgggggcgttgattgccgcctgccgccgtgaacatgtgttttgcgcctgcgtgatgcatgggcacgggaagcatattttgaagcaacaaacaccgctgtggctggcacaacatccgcatgtgatggcctttcatcaggcaccaaaagagtatggcggtgatgcggcgttgttggtgttgattgaagtcgaagagtggctgccgccggagttgccctgaggagttgagcgcgttgcgccaggtacgggtaatggcaggggcgaatgcccctgcctggtgtatctaagggttacaactcattcagtatgtactggaaccggcaagtagaatcgattggctgcatactgctggtatcaacacgcacgaccatatcgtgtaactgtttgtccgttatagggtgtcgatttggcgtgacgctgacttccgccttgtcacatccgctcgcggtaaaagttatcatctgtgcaacccagcggcagtaaccacctgtttcattcatctgcgtactgtcgcacaacttcccatctttcatcaaatacgtactaagcgttttctcaaccacaccgcccgtgctctgcagggtgagcagtttactcttactgacataattctcattccaactaacgtcataaggttgaacagaaacggatggacaaatcgtgtcgtgactatcaggcccctgatacgtcacgccccctggagaggcttcagagtcattcataataaccaaccatggacaagaaaagtaagattcaatctctgcagagacaataacctcaaatgtataatacccgcagttccacccagacggtaatccaggacaacttgctttgttgatattttgatggtagccaatcagcttaacgctaggggcaggaggaggaccactccagctcacattttgcaatatttccccagtcatgagccattgactacttttatattcaccaacgtacactgcggatggcatcattatttttaaattaaaagtcgcaatattacggctatcaccgttgtaaccgtagtaaacgtcaacgctatgcccggcagccatagcttctgtagtagcaataagcatgaccagagcgaacaaccatcgtagtattttcattttaaatatactcaaatgtcgcagttaaagaggcggtaaattcaccgatcgtcacatcacggccgcttttcgcctgtagccaggctctgaaattgatatcgttattgccattggttagcgcaaaggtcgccccatttgtattgttgatggcaacctgcattccgtcggttttttccatgccaattcccactccctgagcggtactactcgtatccagtgccagaaaaccgggttgttcgctgtcttctacccccgtgagcgtgacttttacgttgtatcccgccggccctttgcaatctttcagcttaaagactacgggtacacgagcggactggcctgcaacgttcaaatcctgacgactgaccgtgggaaagcgcacctctgccagatattggccatccaccaccagcgcacaggatttacttaataaattaccggagaaatgcagattattatctgccgcgaataacgtgctactcattgccaatatcagccccgctaacaggacgtaaccaccggactgaatcatacttttattcattgataatccacccgtaatgttgcgtaagcgctaaaattcgtatcgcttaacacagcatcactcgcttttaccggtacggcctccagcttcggcttttgcgtaaaatcagtggcgttgatagcaagcggagtattgagtttaaaacgctgaccatcgtgctgaagctcgataccaaaaccgggtacatcagtttcaattgctgcatcattaaaactggtttgtgtaccagtccaggtgagggtcatctcccaatctggatgacgggtcgtgctgtcacaagtgagttcatatggcacctctttacgaccatagttgccgttgatgtcgtcgataatgagatcgcgaaattcgacttcaatggttttaccaccgctgatgctacaggttggcggactcaataatgtcccgtgaaaggtgatgtcttcatcagcagcatgagctatggcgctactgacacaaagcagggttaagaaagtctttctcattgatagtccaccaccatggtcaaactggcgttaaactcgcccgcagcaagttgcgccccgcttgccttcacaggtacagccttcaactgtggctggttattgatattaaatggcgtccagctattttcaccgacggcaaacaaactgttatcggcgctattttctatccgaatgcccagcccggtgatattggtactgagtaccgtttcgccgttaatcgtactggtattgcccttaagttgcatccgcaagtcgttagcaagactgtttgtgcagttcaacgtgtatttcgcatcttgccgataattggtgccatcaacgttatcagcaatcatattgccgaactctacctggctgcccttgatactacagggtggcggagcatcgaccaacacgcgcagaattaaatccacgggtttactaccagccatagcagataaactacagacactgcataccagcagccctgcgcccactacaaacttttgactcataactccccccgtcatcagcctttgcggctctgctcttcatccacctggcagctgttgccattgcactggaagaacagcggcatccgtgcgccaaagtcgttgacgtaagtcagcaccggtacgctatccattttcacattcagcggtaccgtggttttcggctcaatgaccagagggctgaaccctgcagctggattaccgtttttctgcgcactggcgttgctgataatcacgtagtacggcgttgggttattgacggtaaatgcctgaccgctgcgggtgagcgtcaccttgtgctgccacggacttttcatactgaccttttccagcgcctttggtcgccagaacaacttgatacgcgtttgcagcgcgatttgcagggtattgggtttgttactttttggcgggatctcgcgcacgttaaagtagaacatgctttcacgatcggctggcaatttgttgatatccggcattccctgcacttttacctgcccgttcatcatactatcgatgcgttgcactggcggcagcacagttaacgggctggtgatcttgttacccttttcatcttcaatccagctttgagccagataagggagtttcggatcgttattacgcagcgtcacgctgatacttttgtcgctttcattaaatatcaaacgggtacgatctggcgttacagacgccagggcagacaaactggtagcgctaagcagtaacgccagcgtcatagcacccaatttggcagagcaaagtaaatcagacatggatcattccttaatcacgttattggttagcactaacagaaacagggggatcggtgggtgtcacctgttgcgtctgctcctgaatgacaggctttatgtcatcaggaacaaccggcgcgacgttgcctttatgctggcatggcagtaacaagccgttaaacagatcggcaggcagcgggtccggcaggttgatatcgcaatgcgcaacaccactccagaacacactcatatgttcgccaggtttcaccccagccagatagacactaccgtcatcatcgacaaggcccactgtctgctcgttatcattttttacttctgcgccaaacggtggatggctgccatcttgtaaacgcagcaccgccatcgctttttgaccactgatgacggcaaatttgcggtagccaatggctccttcagttagcgtggcttgcaccacgctctgggttgcttcggcgttttccggcaatttgttgaggtcgatatacgcctgattgcgataataattgttaacgtcagaaacgacggctttaccaaacatattggtataaacagcagccccgttaccttccaccggaacatcggcaacgccatcggcatcaatcagcaggcgtgtcccgcccatattctgggtacggtgaagtgcgccgccgtgggtagtaagcgttgcgccgccctgtaagctcaagcccgcagaggtgtattgcccttcatggtagttcgcactgaggtcaacctgcgccaggctaccatcatggctgtagtagccatcaacgctggtgtgtttgtcactggtgccgatgttcaactgatagtgagtcgcgtcatcgacacggctaaaataaccgacctggctgctgtccgtcccactgccatagttgccgttatagctaacggtactgttgtcgccccacggcatactgagcgaaatttacatgcccttatccgcccggttgtcatactcgtagcggtagccagtcagggaaacgctcatattacgaatgctgcccatattgaaatagtgggagagcatgatgttgtagtttgtctgctcctcacgatcccagtaggtatggcgggtatagttgagataaacgctaacacccgcatcgcggaagttctggttataagtggcggtgtacatctctttgtcgttgcccgtacggaccatttcgctgtcactggcatccagatactcgctcatggtcataaagttctcttcgctgaagcgatatccagcgaaagtgacgcggctgttgagctggtcaaagtctttggaataactcacacggaaggagttaccgtccaggctacctttgccataagcggtgtctttatccagtttggtatggctatgagtaacatcaaacgcgaccgcgccgaaggtagacaaatcgcgaccgacgcccagcgccgcagactgatagttttcatcacccagcgcaccgccatataagctccagccgttagcgatgccccaggaggcttcagcaccagagaaaaatcccccctcgacatggtggccccactcttgcggacgtcccatcatgatcttatagcgaacctggcctgggcgagtgaggtatggcatgctggcggtgctgatgtcatattcctgcacctggccgttctgttcttcaatgcgaatatgcaacgtaccggagacggaatcaccaagatcctgaatacgaaacggtccagccggaacctgcgtttcgtaaatcacacgccccatctggctgacggtcacttttgctgtggtgtgtgccacgccggaaatgtctggcgcgtagccgcgcagattgggaggcaacatttgatcgtcagtgctgacactgccaccaacataattaaaaccgtcgaaaatatcggaattgaggtaatcttcgcccagcgccagtttggcttttaaactcggtaacgcccgccaggcataatagcgactccactcccattttttttgtgtgtcatcgccgccaaattcatcgtcatcatcattactgcgcgtatgttgatagttggtctgccagtcagcgcgcatacgccatggccccaggttaaccccgaccgtcccgttgccgctgatctcgttactgtcatcgccgccattttcttcgtgtcgtgtttgcgcagtgatgctgtagtccgcaatgatcccggagatgccatcatcccaacgagaaggtggatcccagtcgggccaggtatattcgaggtaagcctgcggtagactaatgactaatgcggactggcttaaatcagccttaatttccacgccttccagttgaccgggcttcaggcatttaccatcgtggctccattgcagatttttcgccacgtcttcttttaaaccaaactgcgccaccagttccggtgtcagacaagcatagcttttgctaacgtcatcttcaccagcataccagtaaatatcgtactcttccgccaatggctgtttatttagttgaacctgtaaattgtattttccgggctcaacatacccctggctggaaaaacgcttcagatcaatttttgtgtcgccttttaattccagaaaacgggaatcaaactgaatgtcgtcttcagcccagacactgctataactcccactcattgccagcgcaatgcaccacggaagaatccgtaatcgaaaaagagaatggtcaggcatacacgtttttatccgtttttattcttgttcggtcaaaatccatttaaataccccatagcagtgtcgctatgggggtatgccttacaggtaagtaatctggaaggtggtatttgcttcgaaattacccagatctggcgcatcagctgcgccgaccagccaggctttaaagttcagagtctgcttcgctttgcctttattagtggcagtatctttcacgattttctggtcaatacccatgccgcttttgtaagaggtacccagagagtcaccgatcgccaggctaacattgttaaatgccgcaccggtatcggtattgaaaatggtgtaataattgccgctatttgcagaagaaacggtaccagtaaaggtagtggtcattgtttcctgagtatcaaatacgcaatcttgcaggcgaatctggaaatttttcggcgtggtggtgccgttatttttcagtttttcggcaccgatatcacccatatcaacttccagtttgtgatcgtccggaacgatagaacacacactgtcttcaatggtgccgtaaaaacgtgcagtaccgttgttacccgcagcgattgttgccgtagaggtgaacgcgcccatcaccattgccgcagcaatagctgttttaacaaacttactcattatttgtccttaaactataaataattaaaatataaacattgcaatacattgattcagtcaatagccaatgtttatacccagccattgaatacggcatgcgatccaaaaaaacaggtcgtaaaaaatgtattcgttggtgtggggtcgaatagtgatgttttcactcccctgattcaatttaattttactaatgagtaaatgtagatttaattaatatattgataggggaaagattatcttaaggatcttctaaaaaaacacgaaatatatatttagaaaaaacaggaagcatatcaacaatgaatgccaatagcttaaaaaacaaacaatgaacatataatgcgattggcattaacccgcttttgtcgatataatatataaacactatagccagaatttaatcaagtttcaattacgtcctgcctgattattcaactctattttctccattatctgtattaataaatgataatgagtgtcaaacagacattattcatttcaacatgtaactttgggcaaaatcaagatacgcgcagaagaatactttccgaatgaaagttaaaggtgttttatttatagatggggagagtcttcgatagtagtgaggttgacagatatccgctgcctgatgagcaattatgcccaatgaatctacctcattgggcataatttggaactcatcagatagcttttgccatcttcagattacacgggctcatctgccagttgaatgtgccgtttccgctttcatcaagcgttacgctggcaatggcgctggtggtaaacataggcggcgtttcgcccggacataactcggcaaccagatacccgactaacggtaagtgagagatcaccagtacgctagcaacaccttcattggtcaacgcctgcaaataggcactgaccagaccaacatcgccgcagggcgttaactccggcagaacttctgcactggaaggcaggttcagacaatcccctacttcttccagtgtttgctcggctcgcaggaacgggctcaccagaacgcgttcgatttccactttttgacctttcagccagttcgccatcaggcgagattcgtcacaaccattagtggtcagaggacgaacggaatcactggcggcatcgagggctgcgtcgccgtgacgcatgataaaaacttgcatattgcaccgcttttgttaaccagattcgcccgttttctttcatctgaaaccagagaaagaaaacggtggccggcattgtgccttatccattcaccgaatgaaacgctgttttttacctcaatggcgtaagtatagtcaatatgcgtttacattttgaccaacactccgccattcagcgcggattcatatagctttgaccttcttattgcaggtcagttgcagttgttttccaaaaactttccccacgcgcgcccatctcgaccaaacgctcgcaaggggtaaaacgggaaccatactgcgtggcaagtcgttgcattattgcaaccacttcgcccgcgccgagagaatcgatatagcggaacggtccaccgagaaatggcggaaaaccaatgccaaataccgcgccaatatccccgtcacgcacgctacggataacctgctcatcaacacaacgtactgcttcattcagcatcaacatcacacaccgttcagcaacctgcggtgcggagattcgcccctgcccttgtgtgccaatcagcgggtaaatggcgggatcgacctgttttttgcttttacgccctttctgaccataaagatagaaaccccggccattttttctgcctttgcgatcgtcgttcaaaatactagaaacaacatttgcaggcgcgctaaaacgttctccataagcggcttccagtacaggaataattttagtcccggtgtcgattcctacctcatccaaaagttggattgggcctaccggaaaaccaaatttcactagcgcggcatcaatgtgctctacccgttcaccttgggtcaacatgcggatagcttcattaatgtaaggcgctaagatgcgattgacgtaaaaaccggctttgtcacgcacgacaattggcgttttaccctgttttttcgccagttttactgtggtagcgatggtttgcgcgcttgtccccgcatgaggaataatctccaccagcggcattttttccaccggactgaagaaatgcaggccgataacttgctcaggtcgcgtggcgtgagcggcgatatcaccaatcggtaaagaactcgtattgctagcaaagatggtatgagcggcgcaattttgctcaacttccgccaccatctgttgtttcaattcgagattttcaaacaccgcttcaataatcagatcgcgatgggcaaagccgcgatagtccgtcgttccggagattaatgccagctgtttgtcacgttcgctggctttgagatgacgacggcgaactttgccctccagctgatcccaactgtacttcagcgcatgatttatgccctgcgggttgatatctttaattctgaccggaatccccgctttacaagcagtgacataagcaataccgccgcccatcaagccaccacctaaaatccccacgctgtttaatggcgcaggcggcgcatcactgccgggatctttcttcacgtccgtactggcaaaaaagatactacgcagcgcctggctttgtggcgtcatcgccagttcgccaaacgcccgagcttcggcgtcataaccgctgctggtgccctgcgctaatcccgtttcaacaacctccaggatgcgttctgtcgccggataattgccttgagttttgtgttctgttttcttgccgaccattttgaacagcagcgcacgacctaacggccccgccagaatacgctcgcgtacaggtagagggcgggaagatgggcgctccttctttgccagctcaacagcggcttccagcagaatggagtgcggaacaacgtcatccaccagccccagctttaatgcctgtttcgcccgaagttgttttccggtgaggatcatctctaatgctgtgctgacgcctatcagacgcggtaaacgctgggtgccgccactaccgggtaacaatccaagttgtacttcaggcaaaccgagcaccgttttaggatcgtcagtacaaacgcgaccgtggcacgccagcgccaactccagcccaccacccaggcaagcgccatgaatagccgcgataacctgaatgggcaaagcatgaatctccgccatcaactgttggccctgccgcgccagagcttccgcttcttgcgccgttttgcagttgccgatcatgttgatgtctgcgccagcaatgaagttgtccggtttagcggagacaaacaccacgcctcgcaactctttgttttcacggagttgcttaataatggcgcgcacctggctggcaaactccgccttcagggtattcattttctcacccggtacgtcgatggtgataacggcaatgttgtccagacgaacattaagggtaaacgcacttgtcatttccattattccgcctccagaaccattgccgcgccaagcccaccggcagcacaggcggtaactaaaccaaatccaccgccgcgacggcgaagttcatgcaatgtctgggtaatcatccgcgcgccggtcgccgcgaagggatgcccgtaagcaatgctaccgccaagcacgttaaatttgctatcgtccacttcgccagtggcatgtgcacgccccagtgcttcacgagcaaaacgttcactacccagcaactgaatattcgccagcgtctgagctgcaaaggcttcgtgcatatcgatcaatgtcagatcgctcatcgtcaaaccggcacgctccagcgccagcggtgtactccaggctggaccgagcaacatgtcctgccagacatcaatcgcagtaaatgcgtagctgcgcagataccccagcggcaccagccctaattctttcgcccgggattcagtcatcaggatcaccgctgccgcgccatcggtcagcggcgtactgtttgccgccgttaccgttccgtgtttgcgatcaaacgccgggcgcagctttgcgtaatcggcaaggctggaattaccgcgaatattgttgtcttcgacaagcggttgtttataaggagggataaaggcagtcatcacctcttctttgagttttccgtcactccatgcctgagcggcacgctgatggctacggtgcgctaatgcatcttgctgttctcgggtgatgccgtaggttttcgccatttgctctgcggtgtcgcccatccgcaagccggtagaatattctgctaccgcaggtggtacgggcattaagtcgcgcaaacgcaggcgagagaagagtttcagtcgctggctcatggtacgagctttgttgacatcaaccagcacgcgcgccagttttttactgacgccaattggcaatacgctagaggaatctgccccaccggcaatccccgctcgaatagttcccgccatcaggctttctgcgacgtttgcaactgcctggaaactggtagcgcaagcgcggctgacgctgtaagcatcggtatgtacattcattcccgtaccgagaacaatttcacgcgcaatgttgggggcttcaggcatttgtacgacctgaccaaagaccagttgttcaatcacttcggcggggatctcgctgcgtgccagcagttcgcctaccaccatcttccctaaatcaaccgcgggaatgccatgaaaagccgtcgcctgacgggcaaaaggcgtacgtaaaccgctaacaatggcgatacgatcgccctggcgggtaaccagcggtaaaacctgacccataacactcccctgtaaaaaaataaataaagtggtctgacctgatcatagtcttaaccatttttttacatttagccaagtggagaaaagggaaagtgggagctatgacacagagagaaaagaagaagagaaaagaaaacgcccctgccagcaactgacaggggcgtacgtacccgagaggaattaacgcagacccagctggaaaatcagcatttcagcttcgcaggcaaaagtgaaatcgatatccaggcgcacaccgtcagactcttcagtgaaagtcggggtgattttgcaaggttcagattccacgctacgggctttttcagtcagcgccgccagcgtttgctctgcttctgcgcggtttgcaaacacgcggctgtaagacgcggtgcagtcggagttgtccataatggtgccaacatccatacagcagcaaaccggggtttcatcagcactacatttactcatcgttgatttcctctgtatgtgcacccaaggtgccagataaacgttgtggatattttacgcttccggaaagtgctgctccagttgttaattctgcaaaatcggataagtgaccgaaatcacacttaaaaatgatctaaaacaaaattcacccgaatccatgagtgcgccacctccaaattttgccagctggatcgcgtttcttagatcatatttgaaaaaagatagaaacatacttgcaacattccagctggtccgacctatactctcgccactggtctgatttctaagatgtacctcagaccctacacttcgcgctcctgttacagcacgtaacatagtttgtataaaaataaatcattgaggttatggtcatgagccagaaaaccctgtttacaaagtctgctctcgcagtcgcagtggcacttatctccacccaggcctggagcgcaggctttcagttaaacgaattttcttcctctggcctgggccgggcttatagtggggaaggcgcaattgccgatgatgcaggtaacgtcagccgtaaccccgcattgattactatgtttgaccgcccgacattttctgcgggtgcggtttatattgacccggatgtaaatatcagcggaacgtctccatctggtcgtagcctgaaagccgataacatcgcgcctacggcatgggttccgaacatgcactttgttgcaccgattaacgaccaatttggttggggcgcttctattacctctaactatggtctggctacagagtttaacgatacttatgcaggcggctctgtcgggggtacaaccgaccttgaaaccatgaacctgaacttaagcggtgcgtatcgcttaaataatgcatggagctttggtcttggtttcaacgccgtctacgctcgcgcgaaaattgaacgtttcgcaggcgatctggggcagttggttgctggccaaattatgcaatctcctgctggccaaactcagcaagggcaagcattggcagctaccgccaacggtattgacagtaataccaaaatcgctcatctgaacggtaaccagtggggctttggctggaacgccggaatcctgtatgaactggataaaaataaccgctatgcactgacctaccgttctgaagtgaaaattgacttcaaaggtaactacagcagcgatcttaatcgtgcgtttaataactacggtttgccaattcctaccgcgacaggtggcgcaacgcaaagcggttatctgacgctgaacctgcctgaaatgtgggaagtgagtggttataaccgtgttgatccacagtgggcgattcactatagcctggcttacaccagctggagtcagttccagcagctgaaagcgaccagtaccagtggcgacacgctgttccagaaacatgaaggctttaaagatgcttaccgcatcgcgttgggtaccacttattactacgatgataactggaccttccgtaccggtatcgcctttgatgacagcccagttcctgcacagaatcgttctatctccattccggaccaggaccgtttctggctgagtgcaggtacgacttacgcatttaataaagatgctagtgtcgacgttggtgtttcttatatgcacggtcagagcgtgaaaattaacgaaggcccataccagttcgagtctgaaggtaaagcctggctgttcggtactaactttaactacgcgttctgataacgcgttcgcctggataaagtcacctgcatagcaggtgactttaactcccccacttcaccgaaagtagtgtcctcattgcttacctcctgagttttgcaaacagcctgttggcagcttgccctttcaaatcaataagcggtatccacagacaaacctgaagggaaaggcatattttcaggcgttctgctcgtccttctcaaagagtttacttttctgcatttccaggatactccccccccctggctattgtgcgctcatacactcaaattaaagataggttctaaataaatgagcgttttttgatagtctatttcattaggtaatatatatttgtaacaaatcaatcaaaatggaataaaatcatgctaccatctattagtatcaacaataccagcgcagcttacccagaatccatcaatgaaaataacaatgatgaagttaatggattagtacaagagttcaaaaacctttttaatggtaaggaaggaataagcacctgtattaaacatctacttgagcttataaaaaacgccatacgagtaaacgacgatccttatagatttaatattaataattccagtgttacttatattgatattgactccaatgatacagaccatattactattggtatcgacaaccaagaaccaatagaattacctgcgaactataaagacaaagaactcgtccgtactatcattaatgacaacatagttgagaagactcatgatatcaataacaaggaaatgatcttcagcgcattaaaagaaatatatgatggagatcctggttttatcttcgataagataagtcacaaactcagacatacggtaacggaatttgatgagagcgggaaaagcgaaccaacggacttatttacctggtacggtaaagataaaaaaggcgactctctcgctattgtaattaaaaataaaaacggaaatgattacttatctctcggttactacgatcaggacgactaccacattcaaagaggaattcgtattaatggtgatagtctcacccaatattgtagtgaaaacgccaggagtgctagtgcgtggtttgaaagcagtaaagctatcatggcagaaagttttgcaactggttccgatcatcaggttgtaaacgagctcaacggggaaagactgagagaaccaaacgacgtttttaaacgttatggtcgagcaataagatatgattttcaagtggacgatgcaaaatataaatgcgaccatctaaaagaaatagtttctactttagtcggtaacaaaattaacgttggccattctcaaaaaatatataagcattttaaggatctcgaaggtaaaattgaagaaaggcttcaaaatcgccaggctgaatatcaaaatgaaattaatcaaccatctgcgccaggtgttaattttgatgatatttaaaattatttttccagttttttgatttttcaacagctgaatatcggaaatagtcagtgacgaacatcagtatttttacataattacgtctaggtcattgtcggtttatctccttttacttgtggtaattgagggataacaacaaaaaaggtgagttttgcgactcaccttttttatttgtttcttattcagaatcaatatcttttaaatcatcctgaatcgcttgtgcgttcggattttcctgcggtttgagttcgccgccattagcgatgaaatcatgacgctggaagtacgcttcgcgcaccataatataaggatcggagctctgacgcagcagaccatcggaatccagcagctgagcgcgggtttcgatcccttcaagcgtccatttacccacagacatcggccaggtcagccaggaaagaaccgggtaaaaaccatccgccatatcaccaccgtcatcacgcagcgtgaagctaccgtagaacggtaactgaacgtaaggcccataacccacgccataatgaccaagcgtactaccgaagcggtgaggttcagtccgttgcagtttcgggttcgccatccctgcaacatcaataaaaccgcccatccccaaaatggtgttcaggaaaaagcgggtaaagtggaccatcccctgataagggtcgccctgcaagaagtagttaaccatcaccgcaggttcttcaaggttgccagtaaagttgctcaaaccgttacgcgccggttgcggaacataatcacgccaggcgacagcgaccggtcgaacaatatacgggtctaatacattgaagttgaagttgtacatggtgcggttgaacccttctaacgggtcagaacgcccttgctgatctgtaccggaactcgcacaccccaccagaagcgtagttcccagagcaagcgcgctcaggcgaagcttcataaatgtctccctgtttttttatggcttatgcagtttgccatccatgacggaacgataccgtatccgcctgtttaggtgtgggcgattgtaacagcacgtcaactgatgtccagacgccctgatttgctgatttgatcatagcctggtaatcgccgccctgtaggctacttgattctatagaaacagaaaaaggcaaacgcagccttttctacattttcagagtaactcccgtcagttgcgagcaaaaaagccgctacgctttagctatacgtgctaattcaagagaagagaccatggacaacgacaaaattgatcaacacagcgacgaaattgaagttgagagcgaagaaaaagagcgcggcaaaaaaatagaaatagatgaagaccgactcccctcccgggcgatggcaattcatgagcatatccgccaggatggtgaaaaagagctggaacgcgacgcaatggcgctactgtggagtgccattgcggcgggtctgagcatgggcgctagcttactggcaaaagggatatttcaagtcgaactggaaggtgtgccgggcagcttcttgctggagaatctcggttatacctttggttttattatcgtcattatggcccgccagcaattatttaccgaaaataccgtgactgcggtactacccgtcatgcaaaaaccgacaatgagcaacgtcggcttacttatacggttatggggcgtcgtgctgctgggtaatattctcgggacaggtattgcggcgtgggcatttgaatatatgcctatcttcaatgaagaaactcgcgatgcatttgtcaaaatcggcatggatgtgatgaagaacacccccagcgagatgtttgccaacgcgatcatttccggctggctgatcgccactatggtttggatgtttcctgcagcgggtgcggcaaagattgtggtgattatattgatgacctggcttattgccctgggtgacaccacccatatcgtggtcggttctgttgaaatcctctatctggtgtttaacggtacgctgcactggagcgatttcatctggcccttcgcactacctactttagcggggaacatctgcggcggcacctttatcttcgcgttaatgagtcatgcacagattcgtaacgacatgagcaataagcgtaaagcagaagcacgccaaaaagcagaacgtgcggaaaacattaagaaaaattataaaaacccggcataaatggcgagggtttaagcaatcgagcggcagcgtacttaccccgcactccattagcgggtatactcatgccgcattgtcctcttagttaaatggatataacgagcccctcctaagggctaattgcaggttcgattcctgcaggggacaccatttatcagttcgctcccatccgtaccagtccgcaaaatcccctgaatatcaagcattccgtagatttacagttcgtcatggttcgcttcagatcgttgacagccgcactccatgacgggtaaaaagtggataaaataattttacccaccggatttttaccctagagccatacagcctcacactcgatgaggcctgtcagtttcttaaaatatcctgatctaccatcgccgtcatagagcgtatttttattacctgatttgcaggttcgattccctattcggagatagcactcatgcaacacgaactacagcctgatagtctggttgatttgaaattcatcatggctgatactggctttggtaaaaccttcatctatgaccggattaagagtggcgacctgccaaaagccaaagttatccacgggcgagcaagatggttatatcgtgaccattgtgaattcaaaaataagctcttaagccgcgccaatgggtaaaatagcgggtaaaatatttctcacatctaaaaaacaccattccaatcaatcccctgctgcttcaagtagatgtctgcaggggacaccatccttgtgtttatccctaaaaccacataaaaaccgtaaattaaattcgaactagcaggccgaataaggcacaccaggaactcgtggttttattcattaactagtggtttttacctgttctcttagccagataataaacgcttcaatttttggccactgcctgcccggtaatgtggtgatgtaataatgctgatggcatttcaccgtcatatcgccaaacggcgcgacgagctcaccactggcaagccttttttgtaccaggcgttttcttcccatcgccaccccaatatgattcatcgcggcaataacagctaaatcagaacgatcaaagccaattccagaagatgtcggcaaattaaccgcataatgttgcgcccaactatgccattcatccgtaccggagtcgttgctccatgcctgtctgtcatggagcaacgtacagtgacacaggttaattaccgtgttggttaaagcatgtctttgagcgtattccgggctacatactggcaggatttcttcatccatcagaaagtgatgagtgagttgcgcactcggcgcatcatcaaagtagatcgccaaatcgattccggcacgttgcagattgacgttgtcattaccagtgagcacggtgaggctaatagacggataccggcgtgtaaagtcacctaatgcgggcaccaaccagcattgggcgatagagggccgggaatacagagttaacgttccgcttaactcctgatttttgatatcaagaatttcctggttcagggtatccaggctgctttttagcgcccaataaacacgtttcccctcgtgcgttaattccactttgcgatgggaacgaacaaacaactgaatgcccaattcttcttccagctgattgatacggtgacttaccgcactggggctcaggctcaattcctctgccgccagggcgaaggactgatgcctggcagccacttcaaaagtatgcattttacttaattgccagccgttaagcagccgatttcttatttcacgaaggggttccataatcacctcatttttcgcttaagtgtaaaaaaatagcggcaaaatttcagctatgagatgagctaaagtgaaccatatctcaattcaccttcatttttagatgtaaatcactccattgatgcaatttacctcatgtgaaaggcaaattttatcgtttgtcagcctgcgttgtttttttgtccaatatcatcaggttaatcacaggggaaggtgagatatgcactctcaaatctgggttgtgagcacgctgcttatcagcatcgtgttaattgtactgaccatcgtgaagttcaaattccacccgtttctggcgctgttgctggccagcttcttcgtgggaacgatgatgggcatggggccactggatatggtaaatgctattgaaagtggaattggcggaacgctggggttcctcgcagcggttatcggccttggcacgatactgggaaaaatgatggaagtatccggggccgcagaaagaattggtctgacacttcaacgctgccgctggcttagtgttgatgtcattatggtgctggttggcctgatttgtggcatcacgctgtttgttgaagtgggcgtcgtgctattgattcctctggcttttagtattgccaaaaaaaccaataccagtttattaaagcttgccattccgctatgtaccgcattgatggcagtgcactgcgtggttcctccacatccggctgctttatatgttgccaataagctgggcgcagatatcggtagcgtgatcgtctacggtttgctggttgggctgatggcaagtctgatcggtggcccacttttccttaaatttctgggtcaacgactgccctttaaacctgtacccacagagtttgcagatctcaaagttcgcgatgaaaaaacactaccgagtttaggcgcaacgttattcaccatactgctacccattgcgctgatgttggttaaaacgattgccgaattgaatatggcgcgtgagagtggtttgtatatcttggttgagtttattggcaaccctatcactgccatgtttatcgccgtgtttgtcgcctattatgtgttgggtatacgccagcatatgagcatggggacgatgctcacacatacggaaaatggcttcggttctattgctaatattttgctgattatcggggccggaggcgcattcaacgccattttaaaaagcagcagtctcgctgatacgctggcagttattctctccaatatgcatatgcacccgattcttctggcctggttagtggctcttattctgcatgcggcagtgggctccgctaccgtggcaatgatgggggcaacggcaattgttgcacccatgctgccgctgtatcccgacatcagcccggaaattattgcgattgctatcggtagtggtgcaattggctgcactatcgttacggacagccttttctggctagtgaagcaatattgcggcgctacgctcaatgaaacatttaaatactatacgacagcgacatttatcgctagtgtcgtcgctctggcgggcacattcctgctgagttttatcatctaagcgcaaagagacgtactatggaaaacgctaaaatgaacagcctcatcgcccagtatccgttggtaaaggatctggttgctcttaaagaaaccacctggtttaatcctggcacgaccagtttggctgaaggtttaccttatgttggcctgaccgaacaggatgttcaggacgcccatgcgcgcttatcccgttttgcaccctatctggcaaaagcatttcctgaaactgctgccactggggggattattgaaagtgaactggttgccattccagctatgcaaaaacggctggaaaaagaatatcagcaaccgatcagcgggcaactgttactgaaaaaagatagccatttgcccatttccggctccataaaagcacgcggcgggatttatgaagtcctggcacacgcagaaaaactggctctggaagcggggttgctgacgcttgatgatgactacagcaaactgctttctccggagtttaaacagttctttagccaatacagcattgctgtgggcagtaccggaaatctggggttaagtatcggcattatgagcgcccgcattggctttaaggtgacagttcatatgtctgctgatgcccgggcatggaaaaaagcgaaactgcgcagccatggcgttacggtcgtggaatatgagcaagattatggtgttgccgtcgaggaaggacgtaaagcagcgcagtctgacccgaactgtttctttattgatgacgaaaattcccgcacgttgttccttgggtattccgtcgctggccagcgtcttaaagcgcaatttgcccagcaaggccgtatcgtcgatgctgataaccctctgtttgtctatctgccgtgtggtgttggcggtggtcctggtggcgtcgcattcgggcttaaactggcgtttggcgatcatgttcactgcttttttgccgaaccaacgcactccccttgtatgttgttaggcgtccatacaggattacacgatcagatttctgttcaggatattggtatcgacaaccttaccgcagcggatggccttgcagttggtcgcgcaagtggctttgtcgggcgggcaatggagcgtctgctggatggcttctatacccttagcgatcaaaccatgtatgacatgcttggctggctggcgcaggaagaaggtattcgtcttgaacctagcgcactggcgggtatggccggacctcagcgcgtgtgtgcaagtgtaagttaccaacagatgcacggtttcagcgcagaacaactgcgtaataccactcatctggtgtgggcgacgggaggtggaatggtgccggaagaagagatgaatcaatatctggcaaaaggccgttaataacgtttcaacgcagcatcgcaatcctttccctgggtgagcgatgctgccgatggcgcagacttaagatccccggtcttacccgctataaccccctccttttatcatcacccaacgcctttcgctgtaaacggcggtttcgcaaaccaaaccaaaaccgtaagtaagataaaagcaatagccgccatacggaaaatctcatttgcagaaatagaaagactctgctgggttatttcattattaatttcattaagaactccactaaggctaccataatatttatccataatttgactgctactattaaacacggggttaaattgatcgatggttgctgtcaactgactatggtgtaagctttcgcgtcgtccccacagcgtcattgtcaagctcgtaccaacacttccactcaaggtacgaaaaaaattactcatactgctggcattggcaaatttattatctggcaagccactaaagctaatcgttgttaagggtaaaaagaaacaggcaacggcgaatccctgaaaaaactgcggcaaaatgatgcctgtaaaatcaatcgttggcataaatgtcacagaacgccagtaatagcaaaccgcatacatcaaaaaactaaatgtcactaacaaccgcatgtctattttgttgccataacgtcctatcaaaggactaattaatagtggcatgatgccgatgggcgcataagcaagtccggcccatatcgcattataccccatcgtttcctggagtaactgcggcataaggacgatcgctccagagtaaaataaatacgcgcatgtgatactcacaataccaatggtgaagttacgggacttaaacaaactgagatcaagaatcgggttctcactggtgctctcccaaatgactaaagagatcagagaaataacacttactactgttaatattattattgtactgctgttgaaccaatccagatcgcgccctttatcaagcataatttgcaagccaccaacaccgagcactaacagggtcagtcctggtagattcattttgaccggactagtctcagtttctcttcctttaagtaaggttaagcataatgtcaggacgataatccccatagggacattgattaaaaatatccaaccccagctaaagttatcacaaatataaccgcccaatatcggcccacatatcggagcgataatcacggtcatactccataatgccagagcaaatgttcttttttctggcggataattccttaataataaactctgactcagtggaattaacggccccgccattaacccctgaacgactctaaaaaatatcagcacatcaagattggtgcttaggctacacattaaactagacaggctaaaaaaagtgacactaagtaaaaataatcttaattcgcctattctttgtgccaacctgccagtaacagggatcgcaatggcatttgctacaccaaagctggtgataacccaggtgccttcgtctgtacttgctcccagaaagccagatattgtcggtattgcgacgttagaaatagtggaatccaacatttgcataaatgtcgctaaactcaatgcaatagtgacgcaccataacgtcccaccggttaatggtgccggagtacttttagtgattgccattaaagttgtccattatggctaataatgttgctaatttctttttctatcggactggtatcgataactaaagccttactggtataagccggcatggaggtcacggtactagccagctcaggcatctcggcaatgtcttcgttcttcgtatcaatagttgctgtcatgcttaaaccaatacgcaaggggtgttccatgagttcttttggatcaagagaaacttcaaccggtacacgctgaacgattttgatccagttccctgtcgcattttgtgcaggtaataaggagaacgcattgccggttcccatattgatccctgtcacccgaccatgaaacacaacattttcaccataaagatcgctgataatattgacgctttgaccaatccgtacatccgtgagttgtgtttctttaaagttggcattaacccacatttgacgtgccggtacgacagccattaagctttgtccggggctcactgtttcgccgacctgaacacttctctgggcaatatagccggtaaccggactcttaatatccgtacgtttaagcgccaaccaggcttctttagttgcatccgccgcttcaacgacttgtggctgacggtttaatggtgtgttcattactaaagctttattcgctttataagcctggatagcggcattcaatgccgctttgctacttattaacgtatctttggtatgctccagcgtttctttactaataaccccctgcttcgctaacggcactcgacggttataatcttctaaagattgttgatactgaatacgtgcactagcgacttcggcactgtattgtttatcctgtaagtatagtttattcgtttgccgaacaatatttgccagattatttttagctttattgagtgcgatagtggcatcagttttatccagactaactaaaatgtcaccttgtcgaacgtagttcgtatctttatgattaacgacagtgacactaccactgacttgtgcagaaattggatctgcattccccgtgacataggcgtcatctgtactaatcatgtcttctaattccatactccaataggcataggcaccactaaacgcaataaataaaactaccgccaataaagaaaagtattttcttctgttagaatgttttttattactattaatctgttccactattatctctcatttctcatagatgaaatttatgaattgaatgaaaagagcattcattcttcatatcaaacacagtgcatgtgttgcacattatcccaggaacgttggaggcctaatttaaatgaggtgcaaaaaaaacaacagaggactaaaccgtggcttttgcaatacaattcttacgcctgtaggattagtaagaagacttatagtgccaacttgaaactataaatcatcggtacaatccctgattttattgttgacatttcatttatgccgactatttatatggtatacttgtcgaattatcttaaaggaagctcagattttcttatttttattgagaaaatgagatgacgccttatgtctgtattactacagggagaagggagatgcttcattgcaaagggaataatctatgaacgcaataattattgatgaccatcctcttgctatcgcagcaattcgtaatttattgatcaaaaacgatattgaaatcttagcagagttgactgaaggcggaagtgccgttcagcgggtggaaacacttaagcctgatatcgtcatcattgatgtcgatatccccggagttaacggtatccaggtgttagaaacgctgaggaagcgccaatatagcggaattattattatcgtctccgctaaaaatgaccatttttacgggaaacattgtgctgatgctggcgctaatggtttcgtgagtaaaaaagaaggcatgaacaatatcattgcggctattgaagctgcaaaaaatggctactgctatttccccttctctctcaaccggtttgttggaagtttaacgtccgaccagcaaaaactcgactccttaagcaaacaagaaattagtgtcatgcggtatattcttgatggcaaggataataatgacattgctgaaaaaatgttcatcagcaacaaaactgtcagcacttataaaagtcgcctgatggaaaaattagaatgtaaaagtctgatggatctttacacattcgcacaacgtaacaaaatcggctaaccacatgaagtttttaccctatatttttcttctctgttgtggtctttggagcaccataagtttcgcagacgaagattacatcgaatatcgtggcatcagtagtaacaaccgtgtcacacttgatccactacgtctgagcaacaaggaattacgttggttagcgagcaaaaaaaatcttgtgattgcagtacataagtcccaaacggctacgttgttgcataccgatagccagcaacgggttcgtggtattaatgctgattatttaaatcttttaaaaagagcgttaaatatcaaattaacactccgggaatacgcagatcatcaaaaagcaatggacgcgcttgcagaaggtgaagtcgatatagtgttaagtcatttagttactagcccgcctcttaataatgacattgctgcaaccaaaccattgataattacctttccggcgctggtaaccacccttcacgacagtatgcgaccgcttaccagtccaaaaccagtaaatattgctcgggtagcaaattaccccccagacgaggtaattcatcaaagttttccaaaagcaacaattatctcttttacaaatttatatcaggcattagcatccgtcagtgctgggcacaatgattactttattggtagtaacatcattaccagcagtatgatttcccgctatttcactcactccttaaatgtagtgaaatattataacagcccgcgtcaatataattttttcttgaccagaaaagaatctgtcattcttaatgaagtactcaatagatttgttgatgctttaacaaatgaagttcgctatgaagtaagtcaaaattggcttgatacaggaaacctggcctttctgaacaaaccattagaactcactgaacatgaaaaacagtggattaagcagcatcccaatttaaaggtgctggaaaatccttacagccccccctattctatgacggatgaaaatggcagcgttcggggcgttatgggggacattcttaatattattaccttgcaaacaggtttaaatttttctccgatcaccgttagtcacaatatccatgctggaacacagcttagccccggaggatgggatataatacctggcgctatttatagtgaagatcgagaaaataatgttttatttgctgaagccttcataacaacgccttacgtttttgtcatgcaaaaagcgcctgacagtgaacaaacattaaaaaaaggaatgaaagttgccattccatattattatgagctgcatagccaattaaaagagatgtatccggaggttgaatggatacaggtcgataatgccagcgctgcatttcacaaggttaaggaaggtgaacttgatgctctggtcgcgacacagctaaatagccgttacatgatcgatcattactatcctaatgaactttatcattttcttattcctggcgttccgaatgcaagccttagcttcgcttttcctcgcggagaaccggaacttaaggatattattaataaagcactgaatgcaattcccccaagcgaagttctgcgcctgacggaaaaatggattaaaatgcccaatgtgaccattgacacatgggacctatatagcgagcaattttatattgttacgacattatccgttttattagttggcagtagccttttatggggattctacctgttacgcagtgttcgtcgtcgtaaagtcattcagggtgatttagaaaaccaaataagtttccgaaaagcactcagcgattccttaccgaatccaacttatgttgtaaactggcaaggtaatgtcattagtcataatagtgcttttgaacattatttcactgcggattactacaaaaatgcaatgttaccattagaaaacagtgacagtccctttaaagatgttttttctaatgcgcatgaagtcacagcagaaacgaaagaaaatcgaacaatatacacacaggtatttgaaattgataatggcatcgagaaaagatgcattaatcactggcatacattatgcaatcttcctgcaagtgacaatgcagtatatatttgtggttggcaagatattactgaaacgcgtgatctaattaatgcactcgaggtagaaaaaaataaagcgataaaggctaccgtagcaaaaagtcagtttctggcaacgatgagtcacgaaataagaacaccaataagctctattatgggcttcctggaacttctgagcggttctggtcttagcaaggagcaacgggtggaggcgattagtcttgcctacgccaccggacaaagtctcctcggcttaattggtgaaatccttgatgtcgacaaaattgaaagcggtaactatcaacttcaaccacaatgggtcgatatccctactttagtccagaacacttgtcactctttcggtgcgattgctgcaagcaaaagcatcgcattaagttgcagcagtacgtttcctgaacattacctggttaagatcgaccctcaggcgtttaagcaggtcttaagtaatttactgagtaatgctctcaaatttaccaccgagggggcagtaaaaattacgacctccctgggtcacattgatgacaaccacgctgttatcaaaatgacgattatggattctggaagtggattaagccaggaagaacaacaacaactgtttaaacgctacagccaaacaagtgcaggtcgtcagcaaacaggttctggtttaggcttaatgatctgcaaagaattaattaaaaatatgcagggcgatttgagtttagaaagtcatccaggcataggaacaacatttacgatcacaatcccggtagaaattagccagcaagtggcgactgtcgaggcaaaagcagaacaacccatcacactacctgaaaagttgagcatattaatcgcggatgatcatccgaccaacaggctattactcaaacgccagctaaatctattaggatatgatgttgatgaagccactgatggtgtgcaagcgctacacaaagtcagtatgcaacattatgatctgcttattactgacgttaatatgccgaatatggatggttttgagttgactcgcaaactccgtgagcaaaattcttccttacccatctgggggcttacagccaacgcacaggctaacgaacgtgaaaaagggttaagttgcggcatgaacttatgtttgttcaaaccgttgaccctggatgtactgaaaacacatttaagtcagttacaccaagttgcgcatattgcacctcagtatcgccaccttgatatcgaagccctgaaaaataatacggcgaacgatctacaactgatgcaggagattctcatgactttccagcatgaaacgcataaagatctacccgctgcgtttcaagcactagaagctggcgataacagaactttccatcagtgtattcatcgcatccacggtgcggctaacatcctgaatttgcaaaagttgattaatattagccatcagttagaaataacacctgttagtgatgacagtaagcctgaaattcttcagttgctgaactctgtaaaagaacacattgcagagctggaccaggagattgctgttttctgtcagaaaaatgactaaatagcggctcccacaatgttcaaatgtgggagctatttaccagcacatcttacatttaactactgaactcctggcgaatttgttccccatgctggtcgagcgttgccgctcccggcataacatgcgggtccgcgcagccgctgatttttatcggattacccggcatcattattcccccggcttcaatcaacatatttctcgcctgagtttgtggcaatttaatggcctcagccacacttaataacggcgcgacgggtacaccaacttcatgtattctggctaaccaaacttcagctgcctgcgtttttaacgtccgctcaatatattgtttaagaatagcctggttttgtacgcgtaaaatattgctgctaaatcggggatcattaaccagttccgtaagctccagtgcctggcataacgcagaaaaaagcttgtcattaccacaacaaatcgtaatcggcttatcctgagtattgaaaacatcaaaaggtgccatgtagggatggcgatttcccagacgttgtggactcttcccagttgcgatatatgccatcagaccatgctccagaaaactcagcgtggcatcaaacatcgctatatcgacatgcgcccctctctggctcttttcgcggccataaagtgcactcactattccgctgaataaatagacaccgccgcatagatccgcaagagatgtaccaacgcgcactggcggagcatcaggatatcctgtttccatcattatcccgctcattgcctgaatgatggtatcgtaggcaggagcatcttttagcggaccggtatgtccgaaaccactgctactagcatatatgaggcgcgggttgatttcttgaagcgtttcccaactaaaccccagtttttccattgtacctgggcgaaaattctcagctaatacatcagcttgtttgagcatatttataaatatacttttatcgtgatcattctttaaatcaagaaccacactctctttgccatgattaataaaactgtaatagagactctgtccatccacatagggaccaaatgtgcgggtatcatcaccatgacccggcggctcaactttaattacccttgcgcccatattacaaagaagttgagttccgaaaggtccattaaggacatgtgtcatatcgataactaataagccttcaaacggccctttgctttcattatttgtcatttgcttatgccttgaaaaaagccgaaggtgaaaagacacttcggcatttatgtaaaatcaataacatgattaattaactaaccagtcgactgacataaatccacaagggagccgtgacgacaaagcccagtacgctcacagccaaactcgctgtaccagtacgggtgtagacattaaaccggctggcaataatgattccggagaatgccggcggtaatgcgcctgccagtaccatcatctgcagatgttcgctgttcaaatgacatgccataccaacgagaagcagtgccagtggcatcagaatcagcttcaggaaggtgttataagcaatttcggcactgaactcgaatttatgtgcagccagagtcaaccccgcagcgaataccgctaccccactgttagccttcgcaatcagattaaaggttgggtcccatgctgccggaatttttaccccaaccaacaccaggatcgttgccagaacaggtgcccatactactggctcctttgccgcagaaattaatgcgctcagattactattcttcttaccatccgctccactagaaggattcagcaaatacagaccaataggaatagtaattgcgttaacaataatagaaataattgctaccactaaacctgtacttacggaatcaccataaataggatcgagaactgcaaaccccaggaatccaatggtaggactacctgcaattaatgcacatacagctgcttctgcatgggtacgtttaaaaaatttgtagcaaccgaaccaggagaaaaagaaacatccgacaataaccacaagacttacaagggtcagacgagtgtccgcaaaaatcatttccctgtttgcccgagtaatagatacaaatagagccgcaggaagcgcgtagtttaataccagtttattaaatgcccgagcttgatcttcactaaatgtttctcgtctgccgctaaaataacccaacagcatgattacgataataggcaataaatcgccaataaaaaatgttagcataatagtatttccgataagggtcccctcaccatcgcataatgagttggcaagaggagacgatgtcagtatttaattaccagcgacttgttttgggttaagtttggtaatatggccactttcagttcctgctgcagggtcgatgaccacattaataatggtcggtttgcggctctgaataccggtggttaaagcatgacgaagttcatctgtcgtggtgacgttatagccaacgccacgaaacgcatccattaatttgtcataccttgcatggtgcaacagatccgttggacttggtgcaccagcgccactgagatcaacaccgtctcctctgtagatgccgccattattaaaaataacgatcgtcaccggcaggttatatcgacaaatcgtttcaatttccatcccactgaaaccaaaagcactatcaccttcaatggcgacaaccggagaaccagaagtcacgctagcaccgatggcatagcccataccgatgcccatgacaccccaggtaccacaatccagacgacgacgtggtttatacatatcaataatatttcgtgcattatccagggtatttgcaccttcattaactaaataaatatcctggttctcgcgcaatacgtcgcgcacagcacttaatgcattaaagtaatttaatggttgagtatctgtacttaatttttcatgcattttttgtgcattttgctgcttgtggatatttaaaatatcgcgccataccagtggagtcgtaaatgtgttttgtttcagttctgccagcataccttgcatactggatgcaatatcaccaacgactggcacagcaatggggcggttgctgtcaatttcctgcggttcaatatccagttgaataaactgtgtatctgccgcccatccttttttaccgtgtgccaataaccaattcagtcgtgcaccaacaagcatgacaacgtcagcatttgccagggcaaagctacgcgcagctgccgcagaaagtggatgcgtatcttcaaggatccctttcgccatagacattggcaggaatggaatctgagcactttcaataaattcacgaagctgttcatcagcttgactatacgccgcgcctttgccaaggataattaatggccgttcagcttttgctaaaaggctaattgcgctagtgacactcttcgggcatggcaataatgctgggctcggattttcaactttaacaatcgtggttaacgcttcgtctttttccatcgtcgcggccaggacatttgctggcaaatcaagataaactccgccagggcgaccgcttacagagacccggatagcgcgtgccaatgcaatgccaagatcctgcggctgattaacgcgaaatgctgctttggcatacggttttgccgcattcatttggtccagctcttcataatcaccttgctgtaggtcgacgatcgcgcggtcgctggagccgctaatcatgatcatcggaaaaccatttaccgttgcgttggccaatgcggtcaaaccattgaggaatcctggcgcagaaactgtcaggcagatccccggtttttgggtaagaaaaccgcttgccgcagcggcatagcctgcgctctgctcatgacgaaaaccaatataacgaatgccttccgcctgggcatggcgtgccatatccgtcacaggaatacctacaacaccataaatagtgtcaatattattctgttttaatgcttcaacgatgatatgcataccatctgtcatttgaagttgatcactcatgattaataacctcgaaatttttataaattgggagccagaagcccccgttaatatcagatggcgtggttttgcttcattgcagcaatttcatcgtcgctataacccagctcctgcaatacagcagcggtatgttcacctaatagcggcgcagctttaatatccggcgtaaaggcagagaatttcattggacaaccaacggtcagatattttccacgcaacggttgttccacttcaacaacactgccactttggcgcaaagagggatcaagactaatttctttcatacttaaaaccggtgcacaaggaatatcaaactgagtcaaataggccaccgcttcatgtttatcaatagtgacagtgtatttttcgatttcagcaaaaatatcgaaaatatgtggctgtcgtgcatgggctgtactgtatgccggatcggtaatccattctggtttgccgatggctttacaggtgttttcccagttttgctcctgaatagtgaaataaatataggcgttaggatcggtttcccagcctttacatttcaggatccagccaggctgaccgccaccacctgcattaccaccgcggggaactgcatcaccaaatgtaccattcggatactgcgggtattcttccagataacccaatttatcgagacgctgctggtcacgtaatttcacgcggcaaaggttcaatacggcatcctgcatactcatggtgactcgttgcccacgccccgttttttcgcgatgcagcaaagcagcaagtaaaccgatcagcaaatgcattccggtgttgctgtcacccaacgctgcagcgcttaccagcggcggaccatcccaaaaacccgtagtggatgccgcgccacccgctgcctgagcaacgttttcataggcttttacattcacataagggctacactcatcaaaccctttgatgctaccaaaaatcagacgtggattgatttcttgaatatgctcccaggtgaagcccatgtgatcaatggcccctggatgaaagttctcgactaagatatcagcttcgcggatcagcttttccattacctctttgccttccgctgttttggtatttaactcaatagaacgtttgttactgttaagcatggtgaagtaaagcgcatcgatatcaggaatatctcgcagctggtgacgcgttacgtcaccaacgccgggacgttcaattttaataacgtcagcgccaaaccaggccagcatttgagtacaagatgggccagattgcacaccggtgaaatcgagaactttaattccttgaagtggagtactcatagcaatacctattagttaattaaatatgtgttaatttagcgtttatttaaggcgtaatatcttctataaataacccgcaaaatatcgtcgtagctgcactcgatatttttaaaatcctgtatcaagtgctgaaaatcatttcatcgccacttccaattcctttctgcatggtaagtagtgaggacgaaaagaagaatatgataaatattgattcgtggtaatcagagagagtcgcgacatttgtgatgttattcttacaactgtaagaagcgccggtgatttacaagcaagggtatgattacgctttttaaagcgtaccataaaacataacataataaatgatttgtgatgacacgggattattgcggtttactttgaggaatataaaatgcgagtttatagcaccgcgagcgccaaataattttatgaccacaacctgtcgtattgtggtcataaaaaattgtcggctggagggagttaaatcctttacctcaatatactgcctgtcagcattagttcacaaacagtgcttcgctatcgacgatgattccatcttccgcacctttaagcgccaggtttgcctcgtagtattgctttttatcaagcagtttctgcgcatcagcaagtgcattacgagtctgtttaagtggcatcagatattggttttccattacgccaacaccggccaggcgaagctcttccattgcgccctttttatcccctttcgccattttttcattggcaatttttatcgcggcttctttttcgggagttgctacataactctcagaaattccgacagatgcattaatgacaatatattggtcatcattgagattggtctttttacctggcttagcgaactttgcccattcggtactgtcatcactcagcaaagcggaagcttcattggtcagttcttttgccttttctggatcgccatgaaacagagccaggcgcgctacctgcacgtcacgcatcgcatataaaccttgttcagagatacgctctgctgccgctgccgttttctgggtttgctgaacttgctgagtttgctgttgtgccgctaccggagcattatcagcagcccatacagtactagatgccagaattgctgtgaccatcgtggccataattaaacgtttcatacttacctcattctttaacagttttagaaaacgccgccatcatattgggtgagcatgaaatgagaaatcagagagcaacggtcattttgaaagggttatcttacagttgtagttattatcgcaagaagtattttagtcttacaattgtaggaatatgcttcctgtcgcagagaactattcttatataccacaaagagatgtcatttattatatcgatgtaaatactgattaattaaatgtaaatacagccataacatcgtaggttctcagtgaaccattttcaggataactttctatgaaagtaaacttaatacttttcagcttatttttattggtctctattatggcatgcaatgtttttgcattttccattagcggtggtggaagtgagaggagctataaagagactgaaaaaacaagtgcgatgacgaccacacactctacaaaacttcagccaagtcaggcgattttgtttaagatgagagaagatgcgccaccattaaacctcacagaagaaatgccgcccccttttccgacaaaggcgaattatcttattcatcctgtgcgataacgtctttcacatggcaggtgaacaatcatgtctgatgctgatgtgaacacctgcccaaatgagccatcctgacccattaccgcctgccataccccaccataaagcgaatcatcaagccacaagccggggcaagaaacataaatatccccgtcactagttcattaccgccagttaaccacatggtgaagtaataaatgagtgcagcgaggatcaccatgccgaagaaagaagagaccgcgcttaccacgttcagtacctgaccgatgtagccgcttacgcagacaatacacagggcgagaaacatccataaattaatcatagctcaacctcctgccgcgctaaaaaacctgtaacttcagtcactttaatagtaagacaatccttaacctctggcaatttttgctaagcatcaatgaaaacagcatgttaaatgcaagactgttgtgtacggaaaaatatttactttgcacgattaataatcagtagctgaaagcagtcagcgagtgataaagtacagataccgcattcatgctcctcgtggttatgtcctgactagtctttacactctttacaggaaccattgtcgtacatgatggcccaaccaattgagtgtaccgctgtcgacatggaatcttctgcgatacaacaattcgtatctacagaaggtaactatgtttccacaatgcaaattttcccgcgagtttctacatcctcgctactggctcacatggtttgggcttggtgtactctggctttgggtacagcttccttatcctgttctctgctttctcggcacgcgtattggcgcaatggcgcgaccattcctgaaacgtcgtgaatctatcgcccgtaaaaacctggaactttgtttcccgcagcattctgcggaagaacgcgagaagatgattgccgaaaactttcgtagtctcggcatggcgctggtagaaaccggcatggcatggttctggcccgacagtcgcgtacgtaaatggtttgatgttgaagggttggataaccttaaacgcgcacaaatgcaaaatcgcggcgtaatggttgtcggcgtccattttatgagcctggaactgggcggccgcgtgatgggactgtgccaaccaatgatggctacctatcgtccacataataatcagctgatggaatgggtgcagacccgtgggcgcatgcgctctaacaaagcgatgatcggcagaaataatctgcgcggcattgtcggtgcactgaagaaaggtgaagcggtatggtttgctcccgatcaggattatggtcgtaaaggcagctccttcgcgccgttctttgcggtggaaaatgtcgccacaaccaatggcacctatgttctctcccgtctctctggcgcagccatgttgaccgtaacgatggtaagaaaagcggattacagcggatatcgtttgttcatcaccccagagatggaaggctacccgacagatgaaaatcaagccgctgcctatatgaacaagattatcgagaaagagatcatgcgcgcaccggagcagtacctctggatccaccgtcgctttaaaacgcgcccggtgggagaaagcagcttgtacatttaacaaactgctcttactctttccctcctcaaatcggccataataacctcatggtttttatggcttttttcttaaggttttttccttcgctgaatatctaattattaccgtcagaaattaaactgtcgccgatatgagacacttgtaagttactaaaagtaaataagaaaatgcctcttgtctcgtttcagttttaggcgtacattagcgccgtctcgagcagtttagctcagaattctggggtgatgcccacggtaaaatacagggcttttaaggtcgctttgcccggtgtcaactcactgtatcaggtgtaatgaagtcattcaggcgtaacagtaattacgcggagagatgtaaagtgaaatatttctttatgggcatttcttttatggtcatcgtttgggccggtacttttgccctgatgatctaaaagcaaactgtgcaatgaaaaacaggagccatcaggctcctgtttgcatttctgacgacggtgtttattccgcgttttcgtgaatatgtttgctgctggcgggtagtaaaccgtcggcacggaacatcgctttaatccctctgatggcctgacgaatacggtcgcggttttcaatcagtgcaaagcgaacatgcgtatcaccatagtcgccaaagccaatccccgggctgacacaaaccttcgcttcgttaaggagcttcttggcaaattccaggcttcccatggccgcatatggttccgggattttcgcccagacatacatgctagccttcggcatttcaaccatccagcccgcttcatgcagccctttaaccaatacatcacggcggcgtttgtactgttcggcaatgtcgcgcacgcactgttgatcgccctccagcgccgcaatcgccgccacctgcaacggcgtaaaggtgccgtaatcgtgatagcttttaatacgagccagggcgctgaccagcgttttgttgccaaccataaagccgatacgccagcccgccatgttgtagcttttgctcagcgtaaagaactcgactgccacatcgcgtgcacccggtacctgcataatactcggcgctttccagccatcgtagacgatatcggcataggccaggtcatggaccaccagcacatcgtagcgtttcgccagcgccactactttttcgaagaactccagttccacgcattgcgcggttgggttactcgggaagccgaggatcatcatcttcggtttcggataactttcacgaatggctcgctccagttcgttgaagaaatcgacaccttccaccagcggcacactgcgtacctgcgccccggcaatcaccgcgccataaatatggatcgggtaacttggattcggcaccagcaccgtgtcaccatgatccagcgtcgccagcatcagatgcgccaggccctctttgctaccaatagtgacgatggcttcactttccgggtcgatttcaacgtcgtagcgatcctgataccagcgggaaatggcgcgacgtaaccgcggaatgccgcgactagtggagtaaccatgcgtgtccgggcgctgggccacagtacataatttttcgacgatatgcggcggagtcgcaccgtccgggttacccatgctgaaatcgataatatcttcgccgcgccgacgcgcagccattttcagttcagcggtgatgttaaaaacgtagggcgggagacgatcaatgcgcgtaaagcgacgttcagggcgagtgtcagccataatttcctcagattaacgttagcgcccggaccgtccgagcgacgctgccacgatggtggctgttttgaaaatagcctgattaatttctgtctgtccagtgttttagaacattttattaatgacgttaaatgaggaactctgctttaaaaacaggaaatttatctgcgctaacaagaaaattaccactcattttattaacataataatttcaataaatttactaaccagaagtgcattatcaagagatgcattgctaatacaccatttatctatcaatccccttttaaaattgtggtttttcctcaaaaacggcctgctggtcatcagccttcaggttacctatcatagaggtttaatccttattcagagtcacccgtgcacgaaatattcaacatgctgctggcggtcttcgatcgggcagcgttaatgcttatctgcctgttctttctcatccgtatccgcctgtttcgcgaactgttgcacaagagcgcgcactccccaaaagaattgctcgccgttaccgccattttcagcctgttcgccctgttcagcacctggtccggcgttcccgtagaaggcagcctggtgaacgtacgtattatcgcggtgatgtccggcgggattctgtttggcccgtgggtaggcatcattaccggcgtgattgcgggtattcaccggtatttaattgatatcggcggcgtgacggcgatcccctgctttatcaccagcattctggcgggttgtataagcggctggatcaacctgaaaatccccaaagcacagcgctggcgcgtcggtattctcggcggcatgttgtgtgagacgttgaccatgattctggtaattgtctgggcaccaactaccgcgttggggatcgatatcgtctctaaaatcggcattccaatgatcctcggtagcgtctgtatcggctttattgtgcttctggtgcaaagcgttgagggcgaaaaagaggccagcgccgcgcggcaggccaagctggcgctggatatcgccaacaaaacgctaccgctgtttcgccatgtcaatagcgagagtttacgcaaggtctgcgaaattatccgcgatgacattcacgccgatgcggtggcgattactaataccgatcatgtgctggcctatgttggcgtgggtgaacataactatcagaatggcgatgacttcattagcccgactacccgtcaggcgatgaattacggaaaaatcatcattaaaaacaatgatgaagcccaccgcacaccagagattcattccatgctggtgatcccattgtgggagaaaggggtcgtgaccggaacgctgaaaatttactactgccacgcgcatcagatcaccagcagtttacaggaaatggcggtcggtctgagccaaatcatctccacgcaactggaggttagtcgcgccgagcagctacgtgaaatggcaaataaggcagagcttcgcgccctgcaaagcaaaattaatccccattttctgtttaacgctctgaacgctattagtagcagtatccgtctgaatccggataccgctcgccagttgatctttaatctgagccgttatctgcgctataacattgaattaaaagacgatgagcaaatcgatatcaaaaaagagctgtatcaaattaaagactatattgccattgagcaggcccgctttggtgacaagctgacggttatctatgatattgatgaagaggtgaattgctgcattcccagcctgctgatccagccgttggtggagaacgccattgtccacggtattcagccttgcaaaggtaaaggcgttgtcaccatcagcgttgcagagtgcggaaatcgggtacgcattgcggtgcgagataccgggcacggcatcgatccaaaggtgattgagcgggtcgaagcgaatgaaatgccgggcaataaaattggcctgctgaatgtccatcatcgcgtgaagttattgtatggcgaggggctgcatatccgccgcctggagccggggacggaaattgcgttttacattcctaaccaacgcaccccagtcgccagtcaggctacgttattgctttgagccggagtgatattgtgaaagtcatcattgttgaagacgaattcctggcacaacaggaactgagctggctaattaaagagcacagccagatggagattgtcggcacctttgacgacggtctggacgtgttgaagtttttgcagcataaccgcgtcgacgccatttttctggatatcaatattccgagcctggatggcgtgttgctggcgcaaaacatcagccagttcgcccataaaccgtttattgtgttcatcaccgcgtggaaagaacatgcggtagaagcgtttgaactggaggcgtttgactacattctcaaaccgtatcaggagagtcgtattaccgggatgctgcaaaaactggaagcggcctggcaacaacagcagaccagcagtacgcctgccgcgacggtaacgcgtgagaatgacaccattaatctggtgaaagatgagcgaataatcgtcacgccaattaacgatatctattacgccgaagcgcacgagaaaatgacctttgtctatacgcggcgtgaatcctacgtaatgccgatgaacattaccgaattttgcagcaaactgccgccgagccattttttccgctgccatcgcagtttttgtgtcaatctgaacaaaatacgcgaaatcgaaccgtggtttaataacacctacattctgcgactgaaagatctggattttgaagtgccggtcagccgcagcaaagtgaaagaatttcgccagttaatgcatctttaatcgggaactttcatgaaagcaccaggcttgcccgccgatcaacaatttttcgccgatctgttcagcggcctggtgcttaacccgcaactactggggcgcgtctggtttgccagccagcctgccagcttgccggtgggcagtttatgtattgattttccccgtctggatatcgtgctgcgcggcgaatacggcaatctgctggaagcaaagcagcaacgtttggtggaaggagaaatgctgtttattccggcgcgcgcggctaatttaccggtcaacaacaaaccggtgatgctgttaagcctggtgttcgctccgacctggcttgggttaagcttttacgatagccgcaccacgagcttgttgcatcctgctcgccagatccagcttcccagcctgcaacgcggtgaaggtgaagcgatgcttaccgccctcacccatcttagccgtagcccgctggagcaaaatatcattcagccgctggtgttaagtttgctgcatctttgccgtagcgtggtgaatatgccgccgggcaatagccagccgcgcggcgattttctctatcacagcatttgtaactgggttcaggataattatgcccagccgctcacccgcgagagcgtggcgcagttttttaatatcacgcccaatcatctgagtaaactgtttgctcagcatggaacgatgcgttttatcgagtatgtgcgttgggtgcgaatggcgaaggcgaggatgattttgcagaaatatcatctgagtattcatgaagtggcacagcgttgcggttttccggatagcgactatttttgtcgcgttttccggcgtcagtttggtctgacgccgggagagtacagcgcccgttttcagggctaacgtcagaaggttaattctgtttccagcagcgtcaggatactttgtgcatcttgcgcggcaaacaagctctggcggaagtttttattcaccagtttacgcgccagctggctgaagactttcacatgattcatcccttcgttagcacccagcgtcagcatgatcaccagttcgacttcgcccatttcactctgccagccaatcggtttcgccagccgggcaatgctgatactggaatgacggatccactgagatttggtgtgcgggatcgctacgccaaaaccaacgccggtggtaacaatctcttcccgctgccagacatcttcttccagctcaaacggatgttcagtgcgcccgttaacgccgaggttgccgcacaggaactggatcgcctgctctttattgctaaaatcctgatcaacaaagatattctccagcgccagcagtgggcgaacgtcttcttccggcgtaaaggcggtgagtaacgcttcaatttcctgcgcactgcggcattcacatgcctgacgcgccagttcccgacacgcctcgctatccagttgacgaagctggcttttcaccgccggaatacgcgggctactcatactcagctcatccaggcccagcccaagcagtagcggcagataacggctttcaccgcccagttcaccgcaaatgcctacccatttgccccgctgatgcgcagtggtaactatttgctgcaacatgcgcaggaagcttggcgtaatcgggttatatagcgggcttacgcgcgggttattacgatcgaccgcatacagatactgggtcatatcgttggagccgatactgaagaaatcgacctcatcgcagaagtggtcgatgatgtagcacacgctcggaacttccaccatgatcccaagcgtaatcgtctctgcatgacgcaggccatcgcgcttaagctcaacgatcgctttttggatctcgcctttcacccataagatctgatcgaggctgtgaaccatcgggatcatcaactgggcgttgccgaaactggcggcgcgcaaaatggcccgcagttgagtgcggaacaggccagcaaattccgggtaaatacgtaccgcgcgatagccgaggaacgggttctcttcctggggaatattcagataaggaatgcttttatcgccgccgatgtccatcgtgcggaagataatcggcttgtcgcccgccgccagtagcacctgctggtaggcttcaaattgctcctgctcgtccggcgcgctgtcgcgatccatatagagcatttcggtacggaacagcccgacaccttccgcgccgttggcaaacgcgcctggcgcttccagagcggtgccgatattcgccgcaatatcaatacgcttgttatcacgggaataggccagctgcgcggcagcctgcgcctgttgtttttggcgtttatccgccagcgtctgcgcgacctgataataaccgctcaccgcgtcattcgggttaatcgccagcacgccgcactgggcgtcaagcactgcaggttgcccggcataacgggcaatcgcatccagcggcaagccactcagtaccgggatcgcgctggcacgggccagaatcagtgtatggctggtgcgcccggttttctccagaatcatgcccgcaagatttttcaaatcaaggctcaaaaactggcttggggttaaatcttcagccaccagaatggtcggtttttcaagcaccagcttgttgcgcggcttcagttccggccaggtgatatgcagcaactgttcgctgatatcgcgaatgtcgctaacacgttcgcgcagataatcgctggcagaggcagaaagtttggcgcaaacctgctccatattgctgatgatcgccgcccccagcccctgatgctgttctgtcatcaggcgacggatattgcctgcaaattcatcatcctgaatcaggctcaaatgggcgctgaggatagttttgctttcgccgtcacgctcacgcaattgctggttcagttgctcggcaagcgttgccaggctgtgctccagccgggtggaatcttgcgcactggcggggattgcccgataactgtcgaggctgtcgctttgtaacagggtcagcgtacccacgccgacgccgcttgccagcacattgccgtacagtaaatccgggttaaggcggcttaaactacgcggcagcggatgcgccgtcagttctgcctgcgtaggctgaacgctgtcgctgtcgataaagcgcacctggatgtactcttccagcacgcgccgcgcctgctcttcatcgctgccgctaatgttcaggctgcaactgtcattaaatagggtgccggtgccaatcagcgccaggctgcttttcgcatctgcctttgcgttctggcgatggttaataaaagtgatttcgctttgccactggctgcactgttctttaagttcccacgccggacgagcatgtagaccgttaggcaaaggacagagaaattgaatcgttaacataaccgctccgggttaatcaggagatcatctgaaatccgtcagttgaacaaccgtctcacgcgtaagacgttgaataagggcagataaaagttgctgcatctgcaaaatgtcgcggcaatcggcaatgcttgcggcgcaatgtccatggcgggttgctggccccatcaccactgtgggcacgccggtgccggttaagtgcaccgccccgccgtccgtgccgccgttgctgaacatatctgcctgcaacggcacgccaatttctgccgccacggtttcgacccaggcggtaagttttggcggcgcaatcaggctcttgtcgcttaacaccagcatcggcccgttaccaatctggcgatggttagccgcgccataatcaaagtttttcgcccagcaggcggtatcaagcacaatggcgacgtccgggctcaccgcgcgggtggcagtttgcccgccgcgtaatcccacctcttcgctggaacttgccaccagccacacttccgcaggtagttcggcgtcgtgcagttcgcgcagtaacgtcaccagcagatagcaaccgaggcggtcatcaaaggctttccccatcactcgctggtgagggagaacctgaaaagtggtatcaaacgtgacgcgatcgccgggacgaattcccgcctgcatcacttcgtcataggagcgcgcaccaatgtccacgcgcatggcgctgacgtcattcccctgccggtcgccgtcaagcaggcctggaattttgcactcttcacgggtggtgatgcgcaccggctgcagctggcgggcagccatgcgtacgttgccaaccggcagcacatcaatcgccccttcgcgggagatgctgcgcaccataaatcccacttcgtccatatgcgcacagatcatcaccttcggacctgtgctttcattcaggcggatcagcacgcttcccagaccatcaaatcgcacttctttttgcaggcgatccgcttcttccagcaggatctgccgcacttcctgttcgctggaggcgatcgcatctgcctcgctcaacgcttttaataggcttaaatccattatgcctctcccgtgagcaacactgttttcggcatggcgtagagcacttctgcgccttgcggggtaaccagcacaacatcttcgatgcgcacgcccccttgccctggcaaataaatccccggctccacggtcagtaacatgcctggctgtagcgtcgtggtgtcccgcggactaaaacgcggatcttcatgaacttcaatgccgatagcgtgaccggtgttatgaccgaaatagtcgccataacctgcttctgtaatgacccggcgcgcggcatcgtcaacctgctggcagcgcacgccggggcgaatcgcggagattgctgcgagctgtgcctgcaggacaatttgatagacgttaaacagcaggtgagattcggcgctcaccccttcgccattcaccagcaaggtgcgcgtcatatcagagcagtagccctgatacagcgcaccgaaatcgagagtgacaaactcgcccgctgcaacaatcttgtcgctggctttgccgtgcggcagcgccccacgccagccactggcgacaatggtgtcaaaagaggctttttctgcgccctgctggcgcataaaccactccagttcagcggctatctcgcgctcgctcatccccgcctgaataaagcggcgaatatgctctgcaccgcgatcagcaatcccacaggcgaggcggattttctccacctcctctggcgttttgatttgccgcagcacatccggcgtggcgctaaccagtttcgcattgagttcagactgccagcggtgcgcggtttcccaactcacctgctggccctcaaaaccgagcgtttgcaactgttcatcggcaatgatttgattgacgatagtggtaagcgtgttcgtcgcgtcaagcaaatgcagctggtagccttgcgcacgggcttccacctcaacgtaatagcggctatccaccagaatgtgcgcactttcacggctaatcaccacataaccacttccggtggagatccccagatgcggctgtttgttctgccgactggagagaagcactgcatccagttgttgcgccttaagccagtcgcgcaggctagcgagtaatgtcatctggattttccttcttacaggctatcgattaacaatttgcctttacggaacatcatcagacgcaggaacaccaccatcagcgcagttatgactgcccccagcgcgatccccgccatatagacgcccaggttagtgaccagcggccatgcccagatagcggactccgggaaccattgcactgcgcccagccagacagcggcggtactgccgacaatagcgccgaccatatagctcggaatggcggtgatggggctttccagcgcaaacggaatcgcaccctcactgatccccataaacgccaggaacatggcggtcttaccctgcggataaagttgagcgttgaacaggcgtttgccggttaaacgacggtcgataatggtcgccagccccagaccaatcggcggaataacgatagcgatagaacgagcggtgaccggtaatacgtggtcagtggtaaagctgaaggcaacaaaacctgcggctttgttgatcgggccaccaaggtcgattgctgtcgccgcggcgatccccattgcgtacatcagcgcgcccttctcacctgcggcagtcagcacagtacggataccgccgttgatccagccaccaaagggggtgatgacgtagtacatcgccagcatgacaaaaatggcggaaagaatcgggagcaaaaatgtggttttgaacgctaacaggaaatccggtaactggattttctggttcatccacttcacaaggtaaccggcaacgatagaaataatcagcgcaccaatgaaggtggacggcaccgggctagaggtcgcccattgcatagtgctgggatcgaagttcagcagttgcgtcggctgggtagacatcaacccgccgataaaaccagccgggaacgccagtttgccaccgatagagttcgccacaaaagcagcaaacatcggaatggcaaaaccaaacaacacgccgccgaaggactggctcagccaggcaaatttaagtaaggagaggtcgaaaccggagaatttcccgctattaagagcatccatgatgccgatctcagcaggaattttaagccagctataagcaatcagctggctgaaagcgaggatcacaccgcccataattaaggtcggcaccatgcgactaatcccactcatcacatgctgcgggagttcaccccagaagctggttttagaggcctgcggattcttaactgccgctgccgcaccggatgcgccaggcacaacggttgcactgcgttttttaatggccataacaattatccctgtcgaatattactgttgttcagaggcaatcatctcttcgatttctttgatgatgcccgcagcgtttttaattgcgtcctgcaaagtgatttcataaacgtcgcgactttcgaaacgttcgttatcttccggggtaactgccacggagtggatgatgatggtcgcttcggcgatatcctgcgccgtcaggcgattctggataccgtccgcgccctgggtttcaattttcacttcataaccggcttctaccgccgcttcttccagcgcctgagcggccataaaggtgtgagccaggcccatcgggcaggcacataaggcaatcagtttcttactcatcgttaattcctcgttcagtgatagttgacgagtgaaattatgaacgtgcaaaacaaatcgccgttaccagacaaataatgcatttactggagaattaatcccgctgtacggaagtgtgacgcaggtcgaccttgtgaggggacacaaagaaaaattgaataaactgtatgatttaaaagattatcgggagagttacctcccgatataaaaggaaggatttacagaatgtgacctaaggtctggcgtaaatgtgcaccggaaccgagaaggcccggattgtcatggacgatgagatacaccggaatatcatggacatattctttaaagcgccctttatcttcaaatgcggcacggaaaccggaggctttgaagaactcaaggaagcgcggcacgataccgcccgcaataaacacgccgccaaatgtcccgagattgagcgccagattgccgccaaaacggcccataatgacgcaaaacaggctcaatgcgcggcggcaatcggtgcagctgtcagccagcgcgcgttcggtaatatcttttggcttgagattttctggcaggcggttgtcagctttcacaattgcgcgatacaaattcaccagcccagggccagaaagcacgcgctccgcgctaacatgaccaatttccgcacgcaatatttcgaggataatggcctcttcttcactattcggcgcaaaatcaacgtgaccgccttcgcctggcaagcttacccaacgcttatcgacatggaccagatgcgcaaccccaagccccgttccggcaccgtaaaccgcaataggcttaccttcgaccggttctgcgccaccaaactgaatcagatgctcttttttcagcatcgggatcgccatgcttacagcggtaaaatcgttaataatttccagatggctaaaaccgagattctttttcatttcggcaatactgaacgcccaggtatggttggtcatcgccacccagtcaccggtaattgggcaagcgatggcaatacagccgtctttcacctcgaccttatgttcttcaagataaacgcgaatgaccgcttcgaggctggggtaatcaagcccactataggtcttagcctggctgatttcaccactggcaatatcacacagagcaagacgtgcgttggtgccgcccacatcaccgactaatgcatactttgtcattcttcaactgctccgctaaagtcaaaataattctttctcacactgtaaatacctgggggcataacaacaacgccggaaaggcaggctccctgtaaatatcgatctgggtcacacaattactttatcgtttcagcaccaattgcagcgatgcctttttgcaagctgggcaaactaagtatctgaccccgcataaggaatagaacacaggcggcactaacccggacgtagactgtattacaaaagcggcaaaaagcagagacaaaaaacccccgctttgcagcgagggttggaaatttggtggagctaagcgggatcgaaccgctgacctcttgcatgccatgcaagcgctctcccagctgagctatagccccacgatgcgtttacgtaccaagtttgctgggtgcaaaatttggtggagctaagcgggatcgaaccgctgacctcttgcatgccatgcaagcgctctcccagctgagctatagccccgtcacgtaaagcttgtcgagttgacgggcggcatcatatgaattccgcccgaatgtgtcaacggcaaattgcaacgtgtagtttcaatcgctgaaaaatcaggcaaatgaacaattttggaaaaccgctcgcattcagtagttattcatgtcacggtttcctgtaaagtggtgttataaaatgaactactaatagacccacatacattcagggaattgttatgttcaaggagaggatgacaccagatgaacttgccagactgaccggctatagccgccagaccattaataaatgggtacgcaaggaaggctggacaacgagtccaaaacctggcgtccagggtggcaaagcccgactggttcacgtcaatgaacaggttcgtgaatatattcgcaatgctgaacgtccagaaggtcagggagaagcgcctgccctttctggtgatgcgccgcttgaagtattgctggtgacactggcgaaagagatgacgccagttgaacaaaaacagtttacatccttgcttctgcgggaagggattatcggattgttacaacgcttagggattcgcgatagcaaataatatgaaaagattacgcaataaaatgaccaccgaagaactggctgaatgcctcggtgtggctaaacaaactgttaaccgttggatcagagaaaaaggctggaaaacggaaaaatttcccggcgtgaaaggcggtcgtgccagacttattctggtcgatacgcaagtttgcgagtttattcagaacacgccagccttccataacacaccaatgttgatggaagctgaagagagaattgctgaatacgctcctggagcacgcgccccggcgtatcgacaaatcatcaacgcgatagataatatgacagacattgagcaggaaaaagtcgcgcaatttttgagtcgtgaaggaattcgcaatttcctcgcccgtctcgatattgacgaaagtgcataaataaaaaacggcaggatattatctcctgccgtttatctttttacacgctaattactgctgattttcgcgttcagcaataaaatccagcgctttgttgatacgctcgatactgcgggtcttaccaattgcgtgaacggtaacatccagtgctggagactgccccgcaccggttacggcgacacgcagcggcataccaactttacccatacccacttccagctcatccgccgtcgcctgaatagcgtgatgaacgttttcagcggtccagtcagtaatcgcggccagtttgtcacgaaccacttccagcggctgacgcgctaccggacgcagatgttttttcgcggcgtcggcatcgaactcagcaaaatcttcgtagaaataacggcagctctgtgccatctctttcagcgtcttgcagcgttcgcccagcagtttcaccagatcagccagctgcgggccgttacgggtatcgatattttcctgctcaatgtgccactgtaagtgagtagcaacatactccggcggcagcgcgttaatgtagtgatggttcagccacagcagcttgtcggtgttgaacgcactggcagatttgctgacggcattcaaagtgaagtatttgatcatctcttcacgagtgaagatttcctgatcgccgtgggaccagcccagacgcaccagatagttcagcagtgcttctggcaaataaccgtcatcacgatactgcattacgctgactgccccgtgacgtttggacagttttttaccgtcatcgccattgatcatagaaacgtgcgcgtaaaccggcaccggcgctttcagggccttaagaatgttgatctggcgtggcgtgttgttgatatggtcttcgccacggataacgtgggtgatttccatatcccagtcatcgacaaccacacagaagttataggttggggaaccatcggtacggcggataataagatcgtccagttcctggttgctgaactcgatcggaccacggatctgatcgtcaaaaacaacagaaccttcctgcgggttagcaaaacgtacaacacacggttcatcatcagcatgatgctcatggctgtggcggcagcgaccgtcataacgcggcttctcacctttcgccatttgctcttcgcgcagcgcttccaggcgctctttagagcaatagcatttataagcagtgccctcttccagcatctgatcgatcaccgcgttgtagcgatcaaaacgtttggtctggtagtacggaccttcatcccactccaggctcagccagttcatgccatccataatggcttcgatagcttccggcgtggaacgctcaagatcggtgtcttcaatacgcagcacgaactcaccgccgtggttacgtgcaaaaagccaggagtaaagagcagtacgcgcgccgccaacgtgcagatagcctgttgggcttggcgcgaagcgagttttgattttcatgaaatggccttacgtttagaaagatgccgacaaccggcaaatcctggaaaaattaagtgggcgatattctatcactcccgcctgattcctcaatgtagttcgggtttctaccttacgcattattgttttcgttgacaaattgcgcaacacggtctgttttgcgatcatcttgcttaaatttacgacgaacgaacaatttctttagaaaatgcgttgactcattttgaactctccctataatgcgactccacacagcgggggtgattagctcagctgggagagcacctcccttacaaggagggggtcggcggttcgatcccgtcatcacccaccaactactttatgtagtctccgccgtgtagcaagaaattgagaagtgggtgattagctcagctgggagagcacctcccttacaaggagggggtcggcggttcgatcccgtcatcacccaccactttctcgccagctaaatttcttgtaaaaatgtgaagtaccgaagtgggtgattagctcagctgggagagcacctcccttacaaggagggggtcggcggttcgatcccgtcatcacccaccacttcgggtcgttagctcagttggtagagcagttgacttttaatcaattggtcgcaggttcgaatcctgcacgacccaccaatgtaaaaaagcgccctaaaggcgcttttttactatctgcgatactcaaagattcgaacctgcagcaggtttgagttgagcgcagcgaaacaacggagccgctcgtgctggcgacggcccgaagggcgagcgaagcgagtcatcctgcacgacccaccaatgtaaaaaagcgccctaaaggcgcttttttgctatctgcgatttgcgaaattgcctgatgcgcttcacttagcagactactatttccggcaattcctgtctcctcacttactgtgtcaatgcagccaacagcttaaccatcgcgggcgtcacctgctgtgtttcataaacaatatataaatctgcagggatgcgctgtttgagcggacggaaaatgacacctggccagttcatttgtgcgtagctgtccgctatcaatgtgataccaatgcccatactgaccatagcgagtaccgtttgcggttcattaacttcgcgaataacaaccggactaaatcccacctgctggcaaactcgctgcaaaaaatcccagtcagtgtaaacgggcggcattgtaacaaaatactcgtcacgtagcgcttccagcgggacggtggaaaaactactgagatgatgctcttcaggcatcgccaccagaaacgcgctttcatgcaaccgtaagctggtaaaaccagtcggtggttctgtcgccattcgccagatcccggcatcaagttcgcggcgttccagcaaggccatttgcatcgcgggcatcttttcgcgaaaaagaacgtcaacgttaggattttccctgaggaatcgccgcataaccgggcgcatccgtccccacattgccgttcccactacgccgagttcaatccgccctgcttctccccgacctatttgttcaatccgagccaatacattattagcattcaccagcaatcgacggctttcttccatcaagattttgcccgcgtgtgtcagtacgacgctgcggctatggcgaataaaaagctgcgtgccgagttgattttccagctctttaatatgaatgctgagcggaggctgagacatatttaaacgcgctgctgcgcggccaaaatgcaactcttccgctacggcaagaaaataacggagcaacttaagatctgttctgtatacgcgttccataattaagtgctccatataataaatacatcgtattaaattatcatggcataaagtatttcaccaccagatatccgacatacataaacacaatggataatatacccggtaatacatttggtacaggaataggcaagcgcacgattgtaaacaaagcaccaataccaaaaccaacgccggaagaaaataaaatatctttcactaattaacctttatcataaaagcagctctgaagagcagagccgcgaatccttttaatgagtcaccgctcgatgctttatcttttcagggtcatgattatatttaaacccaaagaaaaatatcactgcgagaaaaagagcatatcctgcaaacaccagccagatagtttgccagtcttttacgccatccacgctaaagtaatctactgccatgccactcagaatgctgccaacccatgcgccgacaccatttaccatggtcataaagagcccctgcgcgctggcacgaatgctggaatcaacttcctgttcgacaaatacgctaccagaaatattgaagaaatcgaatgcacagccataaacaatcatgctcagcagcagcaaaataaatccggttgtactcggatcgccataggcgaagaagccaaagcgcagcgtccaggccaccatactcatcagcatgacggttttaatgccaaatcgctttaaaaagaatgggatagtcagtataaagcccacttctgccatctgactaacactcagtaaaatggagggatatttcaccacaaaactgtcagcaaactccgggttacgggcgaaatcatgtaggaacggattaccaaaaacgttggtaatttgcagtaccgcacccagcatcatggcaaagaggaaaaagatggccatgcgtggatttttaaacagcacgaaggcatccagacccagcttgctggcaaggcttgtggtcgcttttttctccgcaaccggaatcttcggcaaagtcagcgcataagcgctcagcagcaaactcgcaccggacgcgatatacagctgcagactactcaattccagatgcagcaggcttactgcccacatcgcgacaatgaaccccaccgtaccaaaaacgcgaatgggcgggaaagcggtcaccgggtcaagccctgcctgggcaagacaggaataagagacgctgttgcttaacgcaatagtcggcataaacgccatcgcattgactaacatcacccaaaacatcatatccggatcagttacggatgccgcataaaaaagtacgcccgcacacaccaggtgacacagcatgtatgcacgttctgcgcgcagccatttgtctgcgatgatccccattataccaggcataataatcgcggcgatccctttggaactgtaaaccatgccaacattagcgccggtgaaatgaagagtattaatcatgtaagagccgagggtaaccagccagctcccccagataaaatattgcaaaaaggacattacctttaagcgcatcgcgatgctcataatcgtttccttgtcgcatcatttggcctcacccgcgaggccgtttcttattgtttttctcaggcaattttgcgcagaaagccacaaataaggttgatgaagttctgcttagagagctccgcagccgccagcgtttgcgcatgactcaatttcacatcgcttaaaccttccgccatattggtaatcgcagagaccgcaacgactttaaggtcgcaatggcgagcactaataacctcaggcaccacagacataccaacaacatccccaccaataatttgcatcatgcgaatttccgccgcagtctcgaaattcggccccggatagctgacgaacacgccctccgtcagagggaaaccctcttctttcgccactttttgtaacagtgcgcggtattccgcatcgtaggcatttgccagactgaagaagcgctctccaaaacgatcatcgttaagacccaccatcggcgtaccgggcatggtgttgatatgatctttcaatgcgaccaggctgcctgcccccacttccggacgcaggctgcctgccgcattggtgcagaacagtagctcgcagcccagcagcttaaaggtacgaattgcgtcagtcataatggtcattccacgaccttcgtagaaatgtccgcgacctttcatacataccaccggtacgccctggagatggcccagcactaactcccccgcatgaccatgtaccgtacttaccgggaagcccggcagcttttcgtaggaaattgcgacagcgttctcaatctgatcggccagcgcgccgagcccggaacctaaaataaaggccactcgtggcgtgaaatcaggtttataagtcttgataatatctatgcaaaacagcgggttatgagaaaattgaacctgagacatacatatcctttttctgtagggtggaatctaacgcctttttatagcgaggttgtcccggctcttaccaatacacttttctcacgcattcaatagcgattcgatatcgatggatttatatcttttctctattaatccacggtaaaaactgtattggcgatattaattcctttgcattaacaatatgtcgtttttagcaaaccactttattaagcaatctactaataacgatcggcatagggaattatgctatgaaaaaacatcttttaactctgacactttcctctatattagcgatacctgttgtatctcatgcagaatttaaaggcggttttgcagatatcggcgtgcattatctggactggaccagccggactaccgaaaaaagcagcaccaaaagtcacaaagatgattttggttatcttgaatttgaaggtggcgctaactttagttggggagaaatgtacgggttcttcgactgggaaaacttctataacggtcgccataataaaccaggtagcgagcagcgttatacctttaaaaataccaaccgtatttacctgggtgacaccggatttaatctctacttgcatgcgtatggcacctacggttctgcgaatcgcgtgaatttccacgacgatatgttcctgtacggtatcggctacaatttcaccggcagcggttggtggttcaaaccgttctttgctaagcgttatacagatcaaacctattacactggcgacaacggctatgtcgccggctgggttgcaggttacaactttatgctgggcagcgagaaattcactcttaccaactggaacgagtacgagtttgaccgtgacgctacctatgcagcgggtaatggcggtaaagaagggctgaatggcgcagttgcactgtggtggaatgcaacaagtcacattactacggggattcagtatcgatatgcggatgacaaactgggcgaagatttttaccaggatgcgataatctactccatcaaatttaacttctgattgattactgccggggctcccggcagtatgaattcactttatatctgatacaacggatccccttcccgcccagccattagcgcattgccctggtctcgtaccacgtcccataaagcttcagcggcggtggaaagactacggttcttcctgcgcaccagcatcaactggcgttcaacaaccggcgtaatgcgctttaccaccagtgggctaccttcaggcaatggtagcgccagtgcgggaagaatactgatgccgatgcctgcggctaccatcgggaacagcgtcgccggatgtccaatctcctgcacaatattcgcctgaataccattgcgcgccagcgctgcgtcaatcagcggtcggctgccactcgcgtaatcctgcaacaccaatttcgctccctgtaatgcctgccagggtacataatcttccacggccaaagcgctatcgcgatggcaaagcagaaagaaaggctcggaaagaatcgcttcacattgcagatcgcccactgggcctggatcgatgacgatgccaaaatcgacatctccctggcgaatactttccattacccactgctgcggacgatcgtgcaggacaaactgaatatctggatagcggcgatggctttcagcaatgcattgcggaataagatgcgcggaaatggtctggctggcagcgacccgaacttttccgctcagttgttgccccatacgcccggtatcgcgcaacgtgctgttcagttcatccagcagtcgctcaagacgcaaagccagctgctgccctgcatctgtaagcaccacttcacgcgtggttctgtccagcaggcgaacaccagtatgattttccagttccttcacactgtgactcactgcgctctggctcaggccgatacgctctcctgcacgactaaaacttttctcctgcgctactgtgacgaaaacctttaattgttttaaagaataattcatctgttttcttcatgaatggatgcaataaatcaattttatttctcaaactggaagaagcacaatagaaccatcgatcatctggagtctttatgaaactttttcgtatcctcgatcctttcaccttaaccctgatcacggtggtgttgctggcctctttctttccggccagaggcgatttcgtccccttctttgaaaatctgaccaccgcagctattgccctgctgttctttatgcacggcgcgaagttgagccgtgaggcgattattgctggcggtggtcactggcgactgcatttgtgggtaatgtgcagcaccttcgtgctgtttccgattctgggtgtactgtttgcctggtggaaaccggtaaatgtcgacccgatgctctactccggttttctctacttgtgcattctcccggctaccgtgcagtctgcaatcgccttcacgagtatggcgggcggtaacgtcgcggcagcggtttgttctgcgagcgcatccagcctgctggggattttccttagtccattgctggttggtctggtgatgaatgttcacggtgcagggggcagccttgagcaggtcggtaaaattatgctgcaactgctgctgccgtttgtgttggggcatctttcccggccgtggattggtgactgggtgagccgcaataaaaaatggattgcgaaaactgaccagacgtccattctgttggtggtttatacagcgttcagcgaagccgtcgttaatggtatctggcataaagttggctggggaagtttgctgtttatcgtggtggtcagctgcgttcttctggctatcgtgattgtagttaacgtctttatggcacgccgactgagcttcaataaggcagatgaaattactatcgtcttttgtggtagcaaaaagagtctggcaaatggcatcccgatggcaaacattctgttccccacaagcgtgatcggtatgatggtgctgcccctgatgattttccatcagatccaattgatggtctgtgcggtgctggcgcgtcgatacaaacgccagaccgaacagttacaggcgcagcaggaaagcagcgccgataaagcttaaagcggacgcttcaggggctggaccagttgcgtcagcccctcggttttaatcagcagcgtgatttgcattagctcaccgagcttccctgccgggaactcatctttgcgggcaaaccacagcagatactcctccggcaggtcgattaagcgacgccctttgtatttgccaaacggcattatcgtattggctatttcaatcagctgctctttttccatctcagctacccagcaaacgcagcatttccgcttcgtcgatgacttcaatgcccagttcctgcgccttcgccagtttagatcctgcagcttcacccgctatcaccagatcggttttcttgctcacgctgcccgcgactttcgcgcccagttcgaccagtcgagctttagcgtcatcacggctcatctggcttaagctgcccgtaagcaccacggttttaccagcaaacgggctgtcaatctcttccgcgttgataacgatcggcgcaggccagtgaacaccttccgccaacagctcgctgatgacattgcggttgctttcttcggcaaagaagttgtgaacgtgggatgcaacgacaatgccaacatcaggcaccttttgcagctcttcaatgctagcggcttccagcgcttccagcgtgccgaaatatgccgccagacctgctgcggtggcctcgccgacttcacggatgccaagtgcatagaggaagcgagcaaaggtggtttctttcgctttttccagcgcgttaaccacgttttgtgcgctttttggccccatacgctccagtccggtcagtttgcctgcggtgagtttgaacagatctgccggagtatggacatattctttttcaaccagctgatcgatgattttgtcgcccattccgtcaacatccatcgcacggcgggaaacaaagtgtttcaggctctctttacgctgcgcaccgcaaatcaggccaccggtacagcgggcaaccgcttcaccttccacacgctcaacgtcagaaccacataccggacaatgcgtcgggaatacaacctcacgggtatcttccgggcgttcagaaagcacgacgttaaccacctgcgggatcacgtcgccagcgcggcgaatcaccactttatcgccaatgcgtaaaccaagacgttcgatttcatccgcattgtgtaaggttgcgttactcaccagcacgcctgcaacatggacaggttccagacgcgcaacaggcgtaatcgcgccagtacgcccaacctgaaactcgacgtcacgcacaaaggtcatctgctcctgcgccgggaatttaaacgctaccgcccagcgcggggcacgcgcgacaaagccaagctgctcctgctgtgccagactgttgaccttaatcaccacgccgtcgatatcaaagcccagcgtcgggcggtcttcttccactttgtgatagaacgccagcacttcttccgcgctttcacaaagcgttacccgatcgctgaccggcaacccccactttttaaattgcagtaaacggccaagatgagtatccggcagctcgccaccttccagaacaccaacgccatagcagaaaaaagtgagcggtcgcttcgctgtaatacgcggatcaagctgacgcagactaccagctgccgcattacgtgggttagcaaacactttcccgcccgtgcgtcgcgcatcttcgttaatcttttcgaaccccgcctgcggcaggaacacttcaccacgcacttccagacgcgccgggatattctctccgtgcagcttcagcggaatggcgcgaatagtacgcacattagacgtgatatcttccccggtggtgccatcgccacgggtcgcggcactgactaaaacgccattttcatacagaatactgacggcaagaccatccagcttcagctcacagcaccaggtgactttctcgttgtttttcagacggtcctgcacacgtttgttgaaagcaagaaagctttcttcatcaaaaacgttatccagactcagcattggtacttcatggcgtatctggctgaaagccgccagcggcgcagcgcctacacgttgagtagggctatcaggcgtaatcagttctggatgtttggtttccagctcgcgcagttcgcgcatcagcctgtcgtattcagcgtcgggaatttccggcgcatccatcacatgataaagatattcatgatggcgaagcgtcgttcgcagttctgtcagttgttgttcgatactttccatatcgcaccatcaatgctaaaaacccccgacaagcgggggttcgaagaggagttaatttgccttaagtgtatcaggcgttggcgtctttgacttcgcggatgatgtcctggtactcgcgcaatttctgcggagtcatcatacggcgctgatcgtcaagcacgacaccgcccacttcatcggcaatatgctgcgcagattgcagcatcagcttgaagttctgcagctcgtcaccgtaagacggtacctgcataaagatagtgacacccggagtagtgaaatccttcatttcaggatcaaaggttcccggtttcaccatattcgccaggctgaataacgccgggccgctgccatccgggctaagatgacgatggtaaatattcatatcgccaaaaatgaagcccgcttgttgaatgctgttaagaagcagttcaccgtttagctcgctaccgtgatgcgccgcgacgttcatgataatcaccgcttctttgcgcttcggtttatccataactggagcaggttccgctacaggctcaggctgtggtgccgctacgggttctgcaggctggaaagcctgttgtgccggttgcggtgcactatgcacaggctgcggcgctggcgcgacctgtgggctaactggctgctgcaacggctgttcaggctgcggctgataggcaggctgctgcaccggctgcgctggatgcggagcatgttgcggcggtacctgcgcttcaggcggctgctggaccggttgacgcggctgcgcagacgcataaggcggttggtactggtgttgcgggctcggacgagcagcctcatgctcctgagcgttagccggggcatgattcacgcggtgaacacgaacctcaccaacgccctcatcatcttcgacatcctcgtcataagaatcgtcgtcacgtttactcttcattcgttttaatggccgatcgcggaacatagaagatcgttctttacggctggtccagaaaccatgtaccagtaaagcgattatggcgatcgcgccaacaatgattaatatcagacgcaaatcctgcatcattatattctctgttgttctaacaccttgccaccacggcaaacatttactcactaagagtatttgccgattacctcaagtgcaagtgcactattaactttcacagcacaaagatagatgaaatcgtgctttttgctgttttttcgaacatatcctaactgtccattgcgcaattacccggtaaaatacgcagaattttcctgggattggtcaaaaggagctcatcctgattatggttagtagtttcacatctgccccacgcagcggtttttactattttgcgcaaggctggaagctcgtcagccaacctgggattcggcgtttcgttattttaccgctgctggtcaatattttgttgatggggggcgcattctggtggctctttacacagctcgatgtctggatcccgactctcatgagttacgttccggactggctacaatggctgagttatctgttgtggcctctggctgtcatctctgtgctgttagtgtttggctatttcttctccacgattgctaactggattgccgctccgtttaacggtttattggctgaacaactggaagcacgattgactggcgctacaccgccagataccgggattttcggtatcatgaaagatgtgccgcgaatcatgaaacgcgaatggcaaaaatttgcctggtatctgccgcgcgcaattgtattactaattctttacttcatccctggtattgggcaaaccgtcgcgccggtactgtggttcctgtttagcgcctggatgttagccatccagtattgcgattaccccttcgataaccacaaagtgccgtttaaagagatgcgcaccgccctgcgcacacgcaaaatcaccaatatgcagtttggtgctttaaccagcctgtttacgatgatcccgctgcttaatctgttcatcatgcccgttgccgtttgtggcgcgacggcgatgtgggtcgattgctatcgcgataaacacgcgatgtggcggtaacaatctaccggttattttgtaaaccgtttgtgtgaaacaggggtggcttatgccgccccttattccatcttgcatgtcattatttcccttctgtatatagatatgctaaatccttacttccgcatattctctgagcgggtatgctacctgttgtatcccaatttcatacagttaaggacaggccatgagtaagatttttgaagataacagcctgactatcggtcacacgccgctggttcgcctgaatcgcatcggtaacggacgcattctggcgaaggtggaatctcgtaaccccagcttcagcgttaagtgccgtatcggtgccaacatgatttgggatgccgaaaagcgcggcgtgctgaaaccaggcgttgaactggttgaaccgaccagcggtaataccgggattgcactggcctatgtagctgccgctcgcggttacaaactcaccctgaccatgccagaaaccatgagtattgaacgccgcaagctgctgaaagcgttaggtgcaaacctggtgctgacggaaggtgctaaaggcatgaaaggcgcaatccaaaaagcagaagaaattgtcgccagcaatccagagaaatacctgctgctgcaacaattcagcaatccggcaaaccctgaaattcacgaaaagaccaccggtccggagatatgggaagataccgacggtcaggttgatgtatttattgctggcgttgggactggcggtacgctgactggcgtcagccgctacattaaaggcaccaaaggcaagaccgatcttatctctgtcgccgttgagccaaccgattctccagttatcgcccaggcgctggcaggtgaagagattaaacctggcccgcataaaattcagggtattggcgctggttttatcccggctaacctcgatctcaagctggtcgataaagtcattggcatcaccaatgaagaagcgatttctaccgcgcgtcgtctgatggaagaagaaggtattcttgcaggtatctcttctggagcagctgttgccgcggcgttgaaactacaagaagatgaaagctttaccaacaagaatattgtggttattctaccaagtagcggtgagcgttatttaagcaccgcattgtttgccgatctcttcactgagaaagaattgcaacagtaatgccagcttgttaaaaatgcgtaaaaaagcacctttttaggtgcttttttgtggcctgcttcaaactttcgcccctcctggcattgattcagcctgtcggaactggtatttaaccagactaattattttgatgcgcgaaattaatcgttacaggaaaagccaaagctgaatcgattttatgatttggttcaattcttcctttagcggcataatgtttaatgacgtacgaaacgtcagcggtcaacacccgccagcaatggactgtattgcgctcttcgtgcgtcgcgtctgttaaaaactggcgctaacaatacaggctaaagtcgaaccgccaggctagactttagttccacaacactaaacctataagttggggaaatacaatgttccagcaagaagttaccattaccgctccgaacggtctgcacacccgccctgctgcccagtttgtaaaagaagctaagggcttcacttctgaaattactgtgacttccaacggcaaaagcgccagcgcgaaaagcctgtttaaactgcagactctgggcctgactcaaggtaccgttgtgactatctccgcagaaggcgaagacgagcagaaagcggttgaacatctggttaaactgatggcggaactcgagtaatttcccgggttcttttaaaaatcagtcacaagtaaggtagggttatgattagtggcattttagcatccccgggtatcgctttcggtaaagctctgcttctgaaagaagacgaaattgtcattgaccggaaaaaaatttctgccgaccaggttgatcaggaagttgaacgttttctgagcggtcgtgccaaggcaagtgcccagctggaaacgatcaaaacgaaagctggtgaaacgttcggtgaagaaaaagaagccatctttgaagggcatattatgctgctcgaagatgaggagctggagcaggaaatcatagccctgattaaagataagcacatgacagctgacgcagctgctcatgaagttatcgaaggtcaggcttctgccctggaagagctggatgatgaatacctgaaagaacgtgcggctgacgtacgtgatatcggtaagcgcctgctgcgcaacatcctgggcctgaagattatcgacctgagcgccattcaggatgaagtcattctggttgccgctgacctgacgccgtccgaaaccgcacagctgaacctgaagaaggtgctgggtttcatcaccgacgcgggtggccgtacttcccacacctctatcatggcgcgttctctggaactacctgctatcgtgggtaccggtagcgtcacctctcaggtgaaaaatgacgactatctgattctggatgccgtaaataatcaggtttacgtcaatccaaccaacgaagttattgataaaatgcgcgctgttcaggagcaagtggcttctgaaaaagcagagcttgctaaactgaaagatctgccagctattacgctggacggtcaccaggtagaagtatgcgctaacattggtacggttcgtgacgttgaaggtgcagagcgtaacggcgctgaaggcgttggtctgtatcgtactgagttcctgttcatggaccgcgacgcactgcccactgaagaagaacagtttgctgcttacaaagcagtggctgaagcgtgtggcagccaagcggttatcgttcgtaccatggacatcggcggcgacaaagagctgccatacatgaacttcccgaaagaagagaacccgttcctcggctggcgcgctatccgtatcgcgatggatcgtagagagatcctgcgcgatcagctccgcgctatcctgcgtgccagcgctttcggtaaattgcgcattatgttcccgatgatcatctctgttgaagaagtgcgtgcactgcgcaaagagatcgaaatctacaaacaggaactgcgcgacgaaggtaaagcgtttgacgagagtattgaaatcggcgtaatggtggaaacaccggctgccgcaacaattgcacgtcatttagccaaagaagttgatttctttagtatcggcaccaatgatttaacgcagtacactctggcagttgaccgtggtaatgatatgattagtcacctttaccagccaatgagtccgtccgtgctgaacttgatcaagcaagttattgatgcttctcatgctgaaggcaaatggactggcatgtgtggtgagcttgctggcgatgaacgtgctacacttctgttgctggggatgggtctggacgaattctctatgagcgccatttctatcccgcgcattaagaagattatccgtaacacgaacttcgaagatgcgaaggtgttagcagagcaggctcttgctcaaccgacaacggacgagttaatgacgctggttaacaagttcattgaagaaaaaacaatctgctaatccacgagatgcggcccaatttactgcttaggagaagatcatgggtttgttcgataaactgaaatctctggtttccgacgacaagaaggataccggaactattgagatcattgctccgctctctggcgagatcgtcaatatcgaagacgtgccggatgtcgtttttgcggaaaaaatcgttggtgatggtattgctatcaaaccaacgggtaacaaaatggtcgcgccagtagacggcaccattggtaaaatctttgaaaccaaccacgcattctctatcgaatctgatagcggcgttgaactgttcgtccacttcggtatcgacaccgttgaactgaaaggcgaaggcttcaagcgtattgctgaagaaggtcagcgcgtgaaagttggcgatactgtcattgaatttgatctgccgctgctggaagagaaagccaagtctaccctgactccggttgttatctccaacatggacgaaatcaaagaactgatcaaactgtccggtagcgtaaccgtgggtgaaaccccggttatccgcatcaagaagtaattcttgccgcagtgaaaaatggcgcccatcggcgccatttttttatgcttccgccagcggcggcaaaatcaattcatcgctctcatgctgctgggtgtagcgcatcacttccagtacgcgcaaccccgctcggtgcactgcatcggttaacgccttccctttcagcaagccactgatgagctgagcacaaaacaggtcgccagtccctttcaggtcggtttttacccgactatgggaaatgacattcacgctgtcggcagtgaccaccacaacctgcatctcctgattttcttcattaccggaggcgctggtaaccaccacccattttaatgtgtcactaagcagactttttgcggcagcaatggcactgtcgagatcgcggcaatttttaccggtcaggatttccaactcaaagatattgggggtaattccctgcgccagcggcagtaaatattgtcgatacgcttcgggaaggtcaggtttgacataaattccgctatcaatatcgccaatcaccggatcgaccatgatcaataggtcaggatggtctttgcgtagcgcagtcagccactcggcaaggattttgatttggcttgccgttcccatatagcccgtggttacagcacgaagttggcgcagcgcatcacgctcctgaagcgcacgcaaatagccgctaaaccattcgtccggaatcgcaccaccgtagaaagtgtcataatgcggcgtattgctcagcaataccgtcggcacggcaaagacattcaggccgttctgtttgatagcaggcacggcaatgctgttgcccacgctgccgtaaaccacctggctctgcacggcgacgatatccgcctgcagtgccctactcttatcgttaaacaacaacaaactactcatttaattttttctccttgccgatgatcctcatcgtaatccaaccgaaactttacctgattctggcagtcaaatcggctatcacaaaacaaggataaggtaattcaatgaagaaaatcatttgtctggtcattacactactaatgacactccccgtttacgcgaagttaactgcccatgaagaagcccgcatcaacgccatgctggagggattagcacagaaaaaggatttgatatttgtgcgcaacggtgatgaacatacctgctatgaagcggtttctcatctgcgtctgaagctcggcaatacccgtaaccgcattgacactgccgagcagtttattgataaggttgctagcagcagtagcattactgggaagccgtatattgtgaagatccccggtaagagcgatgagaacgcacagccttttttacatgcgttaattgcgcagacggataaaacggtgcctgcggaaggaaattaatccgctttgggaaggcatttacaggaggtaacatgaaaaaacgctttatttatcacgatgaaaaaagcaataaattttggtggatagattacgaaggggatagtttagctgtcaactatggcaaggtaggtagtattggtaaattccagacaaaagagttcgataatgaagaacagtgtctgaaagaagccagtaaattgattgccgcaaaaatgaagaaaggctatcaagaagatccaaagtttaacttcatggatcgctactattttgatgatgaagaaattgggttacatgttaaaacgagtcacccaaacttccagtgccattttactgatccactttatatgtgttgctgggatgaagaatctccttttggcagcgatgaaggtgctgatgctctaaacgttcttgaaaatagcctccgtaaagagccggatctggactgtgctgatttccctcaaatgttaattgaaactatgtggggtatgaaatacatcgctatggacagtattcttgaagaggatgttcgtgcgcaattactagtcgatgaaatgagcactatccagagcaatatgattacctacgcaactgcattcggtcagattaaagtcatgggtaaaatctcccataaacttaaaaagatgggactcaatgcactagcgcgtcatcagcttaccgcaaaaattcttcaatggggtgacggtcaggacagtccaatacttcaaaaaatgattgatgaccttacggcgtttcctcacgaaaattaaatactgcatttgtcggcagcaacaactgttaaaaaagtgcgctttgtttatgccggatgcggcgtaaacgccttatccggcctacaaaatcgtgctaattcaatatattgcagaaaccttgtaggcctgataagcgtagcgcatcaggcagttttgcgtttgtcatcagtctccgatgctattaatccttaaatccccgccccctggctaaaatgctcttccccaaacaccccggtagaaaggtagcgatcgccacgatcgcagatgatcgccaccaccaccgcgtcagggttagcttttgccacccgcagtgctccggcaaccgcgccgccggagctgacgccacagaatattccttcccgcaccgccagttcgcgcatggtgttttccgcatcgcgctgatgaatatccagcacctcatccaccagagaagcgttgaaaatccccggcagatattccgtaggccagcggcgaatgccgggaatgctgctgccctcttccggttgcaggccgacaatggtcaccggtttggattgttcgcgcataaagcgactgacgccggtgatagtgccggtcgtccccatgctggagacaaaatgagtgatgcgcccgccggtttgctgccagatttccggcccagtggtggtgtaatgcgcataagggttatcgggattattgaactgatcgagcagctttccttcgccacgattcgccatctccagcgccagatcgcgcgcaccttccatgccctgctctttggtgacaagaatcagttccgcaccataagcacgcatcgccgcacggcgttcctggctcatgttgtcgggcatcagcaatttcatgcgatagcctttcagcgcggcaatcattgccagcgcaatgccggtgttaccactggtggcttcgattaagacatcacccggtttaatttccccgcgcttttccgcctcgacgatcatgctaagtgccgcacgatctttcacgctacctgccgggttattgccttccagttttaaccacacttcactgccgttatccggccccattcgctgcaacttcaccagaggcgtattgcctattgtttgttctaatgtactcacgatctctatccatacgtggtgttgcctgatgcgacgcttgcgcgtcttatcaggtctacaggttacaaaccttgccattaaaaagcccggatcgcgggaagcgcctccgggcgtttaacattcactcaacctatcaggcgctttgtgcgagagcaagttcctcatcgcgggtttcgatacgctcgtcgccgttatacagccgcgcatgttgcagaccaacgaataaacgctcgccacgctgcggggcatcgtcgccatgcatcacgaccgtcagcggttcgttgtaccaccccagcggctgcaccactaattgggtgtagtgacctttcgggctggcttccagtacctgtaccggcagcgggctatcgaggctggtacggcggctgatatccacttcccaagggcgcaggaagagatccaccggcccctgatacgcaggtgtgtagcccagcggccagcgatgcgcgccaacatggaactgcccgccgcgaatggttccctgcaggcggttcacttcgcccataaattcgagcacaaaacgggtcgccggttcgcgccatacctgatccggcgcgtcagcctgttcaatattgccctggctcatcacaactacacgatcagctacttcggtcgcttcttcctgatcgtgggtcacaaaaacgctggtgaattttagttcttcatggagttgacgcagccagcgacgcagctctttacgcacctgcgcatccagcgcgccaaacggttcatcaagcagcagaatttgcggttccacagccagcgcgcgcgccagcgccacgcgctgtttctggccgccggaaagctgcgccggataacgatccgccagatgggcaagctggaccatttccagcaattttgtcactttcgctttgatggctgcggcattcgggcgctcgcgacgcggcagcaccgtcaggccaaaagcgatattgtcgaacaccgtcatatggcggaacagcgcgtaatgctggaacacgaaaccgactttacgatcacgtgcgtgcaggcggctcacgtcggtgccgtggaagcgaatatgcccgctggtttgatgctccagcccggcgataatgcgcagcagcgtggttttcccggaaccggacggccccagcaacgcgaccatctgaccactaggaatatccagactgatatcgttcagcacctgggtgcgaccaaagctcttcttaatattggcaatctcaatgctcatgatgttcctcctgctgtgcgcgtttttcctgattctccaggcgccactgcaacatactttttaaaaacagggtgataatcgccatcagcgttaacagcgccgcagcggtaaaggagccgacggtgttgtagtcctgctccagcaattcaatctgtaacggcaggctcagggtttcgccgcgaatgctgccggaaaccacgctcaccgcgccaaactcgccaattgcgcgggcgttggtcaacaccacgccataaagcagcgcccagcggatgttcggtaatgtgacgcgacggaacatctgccagccggacgcgccaagcaaaatcgccgcttcgtcttcctggctgccctggcttaacatcaccggcaccagttcgcgcaccacaaacggacacgtcacgaagatggtgaccagcaccattcccggccaggagaacataatttgcaggttatgctcgtcgagccaaccgccgagcgggccgttagagccgtagaacagcaaatacaccagaccggcaaccaccgggcttacggcaaacggaatgtccagtagcgtcagcagtaactggcgtccagggaagttaaagcgcgtcaccagccaggccagcagaatgccgaacaccaggtttaccggtacggcaatcagcgcgatcatcaccgtcagccagatggcgtgcagcatgtccggatcggccagattctgtaaaaccggcatcagccccttgctgaatgcctgcacgaagatgtaaatcatcggcaccagcaggatgaacgcgctaaccagcatcccgatgccaatcagaaaccatttgccccagttaatcgggcgcgcgtcataacgcttcaattgggtaacttccgccattaatgacctaccacacgccgaccaaagcgactttgcagagtgttaatactgaacagcagcagcagagatgccgcgaggatcacgctagcaatcgcgctcgctgccgggtaatcaaactcctgtaagcgcacaaaaatcatcaggctcgtcacttccgtcttccacgcgatatttccggcgataaaaatcaccgcgccaaattcaccaagactacgggtaaagctcagcgccacgcccgccaccagcgccggagaaagctccggcagcaccactttgcagaaactctgccagcgcgttgcaccaagcgtttccgccgcttcttcatattccgggcctaactcttccagcaccggctgcacggtacgcaccacaaacggaatgctggtaaaggccatagccaccgcaatccccagccatgtataggtgactttgatatcaaacttcgccagccattcaccgtaaaaaccgtttacggaaaagaggctggccagcgttaaaccggcgacagccgttggcagcgcaaagggtaaatccatcagcgcatcaagcagcgtgcggcctgggaagcgatagcgggttaggatccacgccatcagcagaccgaaaacgccgttaaaaatgcttgccacaaacgcgctcagcagcgttactttgtaggccgcgaccacctgcgggttggtgatcacctcccagtactgcgcccagctcatctgggccagttgcatcaccagcgcggagagcggcagcagcaaaatcaggcacacaaacagcagactggtgccgaggcttaaggtaaagcccggcagcacgcgtctggaggagacagcaaacatcagttacgccccgccgctaacagcttgtctaactcgccgccgctggtgaagtgggttttcatcacttccggccaggagccaaatttgtcttccacgcggaacagctcggtctgcgggaatttgtctttcagtttgtccatcacctccgggttattcacgcggtagtaatagtcggtgatgatggtttgcgcctgcgggctatagagccagttcagataggctttggcggctttttccgtaccgttggcctgcacgtttttatcaacccacgccaccgggaattccgccagaatgttggttttcggaatcaccacttcaaagccctgcgcttcatactgtttacggatgttgttcacttcgctttcgaagctaatcagcacatcgcccaggccgcgctcggcaaaagtggtggtcgcgccacgaccgccagtatcgaacacttcaacgtttttcaggaactgggtcataaactgttcggttttgcctttgtcaccaccgtcagctttatccgctgcgccccatgccgccagataggtataacgcgcgttaccgctcgttttcgggttcgggaaaatcagcttcacgtcggagcgcaccaggtcgttccaatcgtggatattcttcgggttacccttacgcaccaggaagcccatggtggagtagaacgggctgctattattcggcaggcggctctgccagtcggccgggatcagcttgcctttatcgtgcaggatttgtacgtcggtcacctggttataagtgacaacgtcggcttttaagccctgtaaaatcgccagcgcctgtttactactcccggcatgagattgttttatcgtcagtttgtcgccgccgttatcttttgcccattgttgctcaaacggcggattcagggcggcaaacagctcgcgggagacgtcataagaactgttcagcagttccgttgcctgtacatggcccgccagcagcagagaagcgaccagcgcgagactgttctttttcagtaagttaacggccattgcgcacccttataaatttaatgactttctaatagccatcatatttataacggacgtgaaaggagtaacggttttatataccgtttggtgatttggaagttgaaaagggaataagaacttggttcaacaggcgtaattgttgcagtcagtttggacacgaacagcgcggagaaaccggagcgtacacatagtacgtgaggatttcgagcactgcccggggccaaaatgacaaataaaatagcctggtgaacttagttcaagacgaaatcctccccacaaatgcagggaggaaacagaggtgaatcagataccgacgctaaccgtctccggcagtgtgctgccgccatcaatcacattctgtgtaccggttaaatagctggattcatcgcttgcgaggaaggccgccagttcgccgacttccagcggatcggcgaggcgacgcatcgggattgctttcgccatttcagtcagcacgctctctggatcttccgggttgctctggcgggcaatgctttccgccattggtgtgcgcacgtatcccgggcaaatggcgttaacgcgaataccagactgcgcgtactccaccgccaggctttttgtcaggccaacaatcgccgctttcgttaaggcgtacgccgtttcgccaggatcggccaccatatcaccagtgacactagacatcatcacaatgcgaccatctttgcgggcaatcatctccggcagcaccgccttcgtgacgttccatacgcctttaatattgatgtcaatatggaaatcgcgatcgtcatcgctcatatcgaggaaactgcccagacgacaaacgcctgcgttattcaccaggatatcaatgcgcccttctttttccttcgcgcgtttgatagctgcggctacgctcgccgggtcacgcacatcggcgacaaccgccgtacagcgatgaccacgaccacacagttcgtccgccagcttttcgatctcaggggagatatccagcaagattaggttcgcgccatgacgtgcaaaagttctggcaattccttcgccaattccctgcaatgcgcccgtaatcagtgctgtcttgcccgtgagtttacccattttaatgctctccttgttaatacagagcgttacactccattccctctgaaaatacaggataaacaaaatattgctgcggatcagctcactaattcaggaaaatctcaatccagtcgctgctttatgcatcatttcaggcgttgtgttagctcactgctgcgctgaatcattttcaaactctccacatcattgagttgcacaaggccaacaaacagtaaatcggtaacagaattttgcgccgtgcgggtagacatgctgctgctacgccattcggtttctccggaaacggtatcgagggtgaaatgcgccagccgccgcagcggagagtcagtcagagaagtaatggcaatcaccgttgccccctgctttcgtgccgcttctgcgcacaagacaatctcttttttactgccgctgtaagagatagcgatttgtacatcgccttttttcaacgcctgagaaacggtggcttgtacgtgcgtgtcggcttcgcaggccacgcgatagccaattttcatcagtttgaagctcagatcgcgccccaccagcgcgcttccgcccaggcccgttatctggataaacggtgctttactgatgacctcaatgattttttgcagccgcgcgtaatcgagcaacgcgcaggtttgctccagcgccagctctttttcgcgattcagtttgcgcgcgatcacttccaggctatcatcactggtaatgctactgtgcaggtgcagtgccgtggcattcgttttctcccggctggcactgtattcgcctattaacgccatacgcaattcagtaaatccttgcgcgccgagtttttgggcaaatttcactatgctgctctggctaatgccgagctgtttcgccatctgccgactagaaacggattgcagctcactcacgttggcctgcagaaagtcagcgattttttgctcgttttcggtgaattcactccccgcattgcttattttcgtcaggtacaacatcttccactctcctgggctggcagcataaattccgcttaagttcttatgacgctcttcacactctgcgagtgtagactcaatgattcctttaagcctgtcaattcgggatatatgattccatacatctgcaattatttgatcgtaaatagtaaggtcaccaccgatgcaatttgaaaagatgattactgaaggcagcaacaccgccagcgctgaaattgaccgcgtaagcacgctggaaatgtgccggattatcaacgatgaagataaaaccgtaccgcttgccgttgagcgcgtactgccggatatcgccgcggcgatcgatgttatccacgcccaggtaagcggcggcgggcgtctgatttacctcggtgcgggaacatccggtcgtctggggattctggatgccagcgaatgtccgcccacctacggcgtgaaaccgggtctggtggttggtttgattgctggcggcgaatatgccattcagcacgcggtggaaggcgcggaagatagccgggaaggcggtgttaatgatctgaaaaatattaatttaacggcacaggatgtggtggttggcattgctgccagcggtcgcacgccgtatgtgattgccggactggaatacgcacgccagctcggctgccgcacagtgggaatttcctgtaatccggggagcgccgttagtaccaccgctgagtttgccattacaccgattgtaggtgccgaagttgttaccggttctagccggatgaaagcaggtacagcgcagaaactggtgctcaatatgctttccaccgggctgatgattaaatccggcaaagtgttcggcaacctgatggtcgatgtggtcgccaccaacgaaaaactgcatgtgcgacaggtcaatattgttaaaaacgccaccggatgtagcgcagagcaagcggaagcggcgttaattgcttgcgagcgcaactgtaaaacggccattgtgatggtgctgaaaaatctcgatgccgcagaagctaaaaaacgcctggatcaacacggcggctttattcgtcaggttttagacaaggaataacccatggccaaagagatcagcagtgaacttctgaacaccattcttacccgtgtcggcggaccgggaaatatcgccagttgtggtaactgtatgacgcgcctgcgtctgggtgtacatgacagtagtctggttgatcccaatatcaaaacgctggaaggcgtgaagggcgtcattttgaccagcgaccaggtgcaggtcgtttttgggcctggtaaagcgcatcgtgccgcaaaagcgatgagcgagctgctgggagaagcaccggtacaggatgccgcagaaatcgccgcccagaacaaacgtcagttaaaagccaaacaaacctccggcgtgcaacaatttctcgccaaattcgccaccatcttcacgccgctgatccccggttttattgccgccggtctgctgctggggatagcgacgttaattgccacggtgatgcacgttccggcagatgctcagggaacactacccgatgcgctgaattttatgaaggtgttcagcaaaggtttgttcactttcctggtgattctggtgggctataacgccgcccaggcatttggcggcacgggcgtaaatggcgcaattatcgccgcgctctttttgctcggttataaccccgcagcgaccaccggttactacgccggttttcacgatttctttggtctgcccatcgatccgcgcggcaatattatcggcgtgctgattgccgcgtgggcctgcgcccgcattgaaggcatggtgcgccgctttatgccggacgatctcgacatgctgctgaccagcttaatcaccctgctgatcaccgctacgcttgcgtacctgatcattatgccgctgggtggctggttattcgaaggtatgagttggctgtttatgcacctgaacagtaatccgttcggttgtgcggttttagccgggctgttcctgatcgccgtggtatttggcgtgcatcagggctttattcctgtttacctcgcgttaatggacagccagggattcaacagcttatttcccatccttagtatggcaggcgcgggccaggtgggcgcggcgctggcactctactggcgggcgcaaccgcacagtgcgctacgcagtcaggtacgcggggcgattattcccggcctgctgggcgttggtgaaccgctgatttacggtgtcaccctgccccgcatgaagccgtttgttaccgcctgtttaggcggcgcggcgggcggtttgtttatcggcctgatagcctggtggggtctgccgatgggcttaaacagcgcctttgggccgtctggtctggtagcgctgccgctgatgacttccgcacaaggcatccttccggccatggcggtttatgctggcgggattctggtggcatgggtttgcgggtttattttcaccacgctctttggctgccgtaacgtcaatctggactgatatcatgaaacggacaatgctctatctttctctgctggctgttagttgtagcgtcagcgccgcaaaataccctgttctgacagaaagcagcccagagaaagcagggtttaacgtcgaacggcttaaccagatggatcgctggattagccagcaagttgatgtcggttatcccagcgtaaacctgctgatcattaaagataatcagattgtgtatcgcaaagcctggggagcggcgaaaaagtacgatggcagcgtgttgatggaacagcctgtcaaagccaccaccgggacgctgtatgacctggccagtaacaccaaaatgtacgccacgaacttcgccctgcaaaagctgatgagcgaaggcaaactgcatcctgacgatcggattgcgaaatatattccggggtttgccgatagtccaaatgacaccattaaaggcaaaaacaccctgcggatttctgacctgctgcatcacagcggcggtttcccggcagatccgcaatacccgaataaagcggtcgcgggcgcgttatattcccaggataaaggccagacgctggagatgatcaagcgcacgccgctggaatatcagcccggcagcaaacatatctacagcgatgtcgattatatgctgcttggatttatcgtcgagagcgttaccggtcagccgcttgaccgctatgttgaagagagcatttatcgcccgctcggcctgacacatacggtatttaacccgctgctgaaaggctttaaaccgcaacaaattgccgccacggaattgaacggcaatacccgcgatggcgtgatccatttcccgaatatccgcacctccactctctggggtcaggtgcacgatgaaaaagccttttatagcatgggcggcgtttccgggcacgcaggtttgttttccaataccggcgatattgcggtgttaatgcaaacgatgctgaacggcgggggctatggtgatgtgcagctgttcaatgcggaaacggtgaagatgttcaccaccagctctaaggaagatgccacttttggcctcggctggcgcgtgaatggtaatgccaccatgacgccgacgtttggcacgctggcaagcccgcaaacctacggtcacactggctggaccggaacggtgaccgttatcgatccggtgaatcatatgacgattgtgatgttaagcaacaagccacatagcccggttgccgatccgcaaaagaatcccaatatgttcgaaagcggtcagttgccgattgcaacttatggttgggtagttgatcaggtgtatgcggcgttaaagcagaagtaataaaaaggccagtcagtaatgttactggctggtctgagagtgctgacaaacgcaaaactgcctgatgcgctacgcttatcaggcctacgtggagcccacaatatattgaattagcacgatttcgtaggccggataaggcgttcacgccgcatccggcgtgtacaacgcgcacttggtcaacaatctgaggccagtcagtaatgttactgcctggcctttaatcaatgaatcagaaacgcttacagcgccatcaacttgtccaggctcggtgcgaaataatagccgccggttaccggtttggtgaaacgcaacatcgcatcacgcttaccatcggtatcgccaaacatgctcagcagttgctgctcaatgttatgcagacgcgcgcagtaggcgcagaagtacagaccgtgagtgccactggcagtgccgtacggcaggctctggcgaacaatcttcagccctttgccatcttctttcagatcaacgcgggtgaggtgagaggtttccggacgttcgtcgccgtcgatctcttcgttggcctctttggtgcgcccgatcaccatctcctgatcgtgaacgctcatccggttgagctgcttcaggttgtgttcccaacgctggacaaacacatagctgccgcccgcatccacgccgtctttgataaccgccacttcgcgacgcgtctcttcacccgccgggttttccgtaccgtcaacaaagccgctcaggtcacgctcttcaacccaacggaagccgtggatctcttctttcacttcaatgcagtcaccaaaggcttccatcgccgcctgggcgacagagaagtttacgtcgtgacgcagagaaagaatgtggatcaacacatcgaactgggtcgtcggcgcaaggcctttaccgtagcccggaaaatctttcagctcttctgccccaacgccgccgctcagagcgcgccaggtgttgttaccaaaggcaaccaccgcaccaagatgcgcgtccgggaatttcgcttcaaaagttgccagtttgtcggcaaatgttttactggccgcacgcagggcgtcaacttcccctttcacgttggcttcgatccaaatcgccgcgcggcaatgttctggcaaaatgccactctgaacctgagacattgttcctcctgaaaataataatgccacgcaatccgtggcattgttgagcgctattttacgtgttttttcgcggcggcggtttgttcagacgcaaattaacgccgccagataattttactgactttccagtttttcagggtatcgtcgctaggcattaacccttcaggaccacgccattccccgctgaactggtagctaatatgttgactgccttcggctttacattcgacggcacgattatcatcaccatcagctttttggcaattgccaaatgctttgctgtaaaggtcgctaaacggtgtaccgattttaacaccggtgtcagcaggaatatcgctatccagcacgtcaatgcgactgatcgtgccttgatcgccgttaatcaccatcgccacgttgtcgcccttcatcacttcaaaaaagcgcaccacgttgccgttcgcggttttcattccgctgcgcaggcgataatcgccatcaagcgcatcggcaatggcttgttcttgcagtggtgtggacgccgttaattcacccacgccctgctcgctcactttggtggagctcccaaaccagttccacgggttagcggcagaccagttaacactgctcatcgtggaacagccggtcagcatcaatggcatagcgcataacattaaacgcaggcttttcatgtcacttcctttggttattcaataacgttgcttggagtgcaaattcaccaaaaagtgccgttattcttttacttcataaaaacaagcgcgtaaacgtcgattggtcagcagccagattaacgccacaatatccgccactaccagcgccagaccgataccgctaacggattcaccgttcagccacagccacggttgccagcaaagtaaaaccacctgcgccaacagcaacagaaaatagagtacacgccaggtgcgaggaaacgtagcccgccgaccgctcaacaaaaacgccagcaccgccggaatgccaggaatcagccccagccagaaattatcgtgatcgggataaaacagatttagcagcgcagtaccctgctcgcggctcgcaccggcaatgacaaacagcacccaggttcgcgcctgaagcaatagcacaagccagaagagcaagggtaaacgcaggcgaccgtgcgcatcataatggacaggatgaaactcagtactcttcatcttcaatcaaacgcttacccagactcagcacgtcggcgtgttcatatcccaggcgttcatacattccgagcaccatgtcgttatcttccggcacattgatctgaattttcgggcagccacgagcaatcagctttttctccagccgattaagcaacgcattggcaatcccacgcccacgaaactctggatgcacgccaagataataagcagacccgcgatgcccgtcataaccgcccatcaccgttccgaccacgtcaccgtttacctcagcgaccaaaaacaaactgacgtcatggttcatcttacgctcgatgtccatttccggatcgttccacggacgcagcaagtcgcaacgctcccaaagggtgatgacctcttcgaaatcttcctggcgaaatacgcgtatctccatggtattcgttacctttttgcgggttaaaaggctgattatggcgtgaacggtcgaattagccaatatctgacgaaaatcggttgaaaaagtggcataatggggagttgtcaactattgaaatgaaaagtaaaacaattctcaacagcaaaccgtcgtaacggattacgcgatacgatataacatctggaactttattattacaactcaggccgtatgagcacttttaaaccactaaaaacactcactagccgccgccaggtgctgaaagccggtttggctgccctgacgttgagtggaatgagccaagccatcgccaaagacgaacttttaaaaaccagcaacggacacagcaagccgaaagccaaaaaatctggcggcaaacgtgtcgttgttctcgatccaggtcacggcggaattgataccggagcgatcggacgcaacggtagcaaagaaaaacatgtggtgctggcgattgctaaaaacgtccgttccattttgcgtaatcatgggattgatgcgcgtttaacgcgttctggcgatacgtttatcccactttacgatcgcgttgaaatcgcccataaacatggcgcagatctgtttatgagtattcatgccgatggctttaccaacccgaaagctgccggtgctagcgtatttgccctctctaaccgtggggcaagtagcgcaatggcgaaatacctgtctgaacgcgaaaaccgcgccgatgaagttgccggtaaaaaggcgactgacaaggatcacctattgcaacaagtgctgtttgatctggtgcaaacagataccattaaaaatagtctgacgctcggcagccatattctgaagaagattaagccggtgcataaactgcacagccgcaacaccgaacaagcggcatttgtggtgttgaaaagtccgagcgttcctagcgtgctggtggaaaccagctttatcaccaacccggaagaagaacggctgttaggcacggcggcgtttcgtcagaaaatcgccacagcgattgctgaaggcgtgatcagttatttccactggttcgacaaccagaaagcacatagcaaaaagcgataagttatgaaacccgacgcacaccaggttaaacagtttctgctcaaccttcaggatacgatttgtcagcagctgaccgccgtcgatggcgcagaatttgtcgaagatagttggcagcgcgaagctggcggcggcgggcgtagtcgggtgttgcgtaatggtggtgttttcgaacaggcaggcgtcaactttagccatgtccacggtgaggcgatgcctgcttccgccaccgctcatcgcccggaacttgccgggcgcagtttcgaggcgatgggcgttagtctggtagtgcatccgcataacccgtatgttcccaccagccacgcgaatgtgcggttttttattgccgaaaaaccgggtgccgatcccgtctggtggtttggcggtggcttcgacttaaccccattctatggttttgaagaagatgctattcactggcatcgcaccgcccgtgacctgtgcctgccatttggcgaagacgtttatccccgttacaaaaagtggtgcgacgaatacttctacctcaaacatcgcaacgaacagcgcggtattggcgggctgttctttgatgacctgaacacgccagatttcgaccgctgttttgcctttatgcaggcggtaggcaaaggctacaccgacgcttatttaccaattgtcgagcgacggaaagcgatggcctacggcgagcgcgagcgcaatttccagttatatcgtcgcggtcgttatgtcgagttcaatctggtctgggatcgcggcacgctgtttggcctgcaaactggcgggcgcaccgagtctatcctgatgagtatgccgccactggtacgctgggaatatgattatcagccaaaagatggcagcccagaagcggcgttaagtgagtttattaaggtcagggattgggtgtaactccctcacccccactcccgcatccgctgatgcagcgtcagactcggcttctcggaaaacagctgctggtaatccgtggcaaattgccccagatgccagaatccccactgcatggcggcgtcttttaccgtcatactttggctccacggacttatcagttcgcggcgtacggcgttcaggcgaatgcgtttcagccacgcgttcgggccaatgcctaaaatagcgtgaaacgcgttttgtagcgtgcggcggctgacatgcagttgattacacaaatccagcaccgtcaccggttcggacatgttttccagcacatattcacgggcgcgggaaagcaatcgacggtaactctgatgactgatgctttccgccgtcaccattggttgcgcttcttccagcatggcccccatcgccattagcaaattatcccccagcacttttcgcactgcaggctgatggagattttccggattctcgcaaaacgtcgccagcgcctgttggacaaagccccacagcgcggctttatgctgctctttcacttccagcgcgctctggttacgcaacatatgtaatacccgatccgggttatgcaaaaagttagcctgccgggtgatgacatcttcagaaagcaccacgcccaggatcgtgtaatcatccggcgtgctcagttcaaattcagtgccaccagggcgggtggcgatttccgcgcttcccagacattggctaccgataaatccctgctcaccgcgcgtcgccggaatgccaaaccagaagctgttcggccagaccaggcagctctgacgcagcgccagaccggtgtattcacgaaaaacctgaatatcatcgagtagaatttccgtaaattcaccatgaaacttgcccggatgcagctgatcgtaaatctgctgccaggcggtaatcgttaaagcatgttcatagacatccgttgtctgtcgttgatgaacattatccacttcgaccttcggcgtgagcttcaggttttcgggtaagggttcatgataaagatggtgcaaattggctgtacgggtctttttcatgatgttaatgccgggtgttgtaggacacccggcacctccgacaggttaatggggcttgagacgataacgactactgcgtttacgtaacgtcccggcagaaaagagctgttcgagcgcatttctggctttttccagcggccagccaaagtgggcagccacttctcctgccgtcattccctgacgtacacttgttaacagcgccaacaactcgtcagcagattccgcgacgataactggcgcgtcgggttcccttacgggttgcttcggctggcggttaaagccagtaaccagccactgggtgtcatcgtctggccgaccgatctccttgcggctgatgacacgcccggtacgcatcgcggcagcacaacctgcgtccagcgccgcacgacacgccgccagatcgccttccaccaccagcgttaagcgaccagggtcaagcacttcgtgactgagcagacgaacgttagctgctttgagcatggcatccgctgcatctatcgcggcgaccatgccgtccacttccagcaatcccagtgcattgatcatcggcaacctccgttacgcacgctggattggattacgcgcgatttccagcactgcatcggtaaaggcgttacaggctgctttacacgctgcctggctaccggttaaaaatgctgcgctgtagttggtttcagacggtggcgggacataggtcgccagctgtacgtcggcagacttcagggctgcatcaatgccataggtcgcttccagcggcggtgccaccagatacgccatcggatcgccaagcgtgatcccggcggtactactgagataagaaccggtacggctaactacatgtgccaggaatgccgtatcttgcgcgtcattagcccactggaaagctgcgccattttcaatatgcgcaatcatcgcatccagacctgcacgcacttccgccgggtttggcccaccaagcataatcagcacttcaccggcagtcggactcgggccgtgtgcagcgcccgcatataggctgcggccatacaccacttccaccatcgcctgcttggtcgcttcatcagcggcaatgtaggtgacgtcatcggagtcggcagaaatcagaccgaggctacgaatatgcggcggcaatttcagttcacgcgcaaaatcggcgttaacggaggcaatcacccgcatagcggtgacagacggtcgaatcaaatctaaagctggcatgatgcctccttatcgggtcatgttgatgccggatgctttctgctccagcatacgtttcgccaaatccacaatgacggctgcggcttcaaccggcggcgtgccgccctggtgaatgttagagatacaggtgcgatcggcctcaacggtggtcgccatacgcgggctgtaaacggcgtagcaggagaggctttcactctgacccaaccccggacgttcgcccaccagcaggatcactactttcgcgccgaggatctcaccgatctgatcttcaatcttcacgcgaccataacgaacaaagaatggtgtaccgactttcagcccggcctgtttcaggcccgccatcagcggtggcaggatctcttcgtagttcacggtgatcgcatcagtactcaggccatcagaaataacgacctgtacgtccggattggcaacacactgcgctttcagcgcttcaacagcttctgcacacaggcggcggcccatatccgggcgagtcaggtagagatttttgtcgctaatttcagagcgtacttccagcaagccctgcgctttcacccactcttccggcacttctttcagtacggtatctttgctacgagagtgatcggccaggaaacgcagcagcgcctgcgtacgtggacgcggaccggcacgaccggtacaaacgcgggccacggtgctgcggcgcagttctgttaatacgtctgcgcgatgcggattttcaacaccaatccacgcttttgcttcagcggaacctaaatccagcgcacagctttcgctggtcaccggtgccgcacagttggtggtggcgcactttgcttcactcggcgcgggggccgcttgtcccatactcgccatcacgctgcgtacaatttcttcaatctgtttttgatccatgatatgttatctccgcgtcatcagaagaacagactcggatcgcccgcccgtttggtcaggcgaccgtttgccataatgcccatgctttccagccagcgttcaaactccggactcgggcgcaggttgagtaactgacgcacagtggcggtatcgtggaatgcggtggtctggtagttgagcatgatgtcatcacccagcggcatccccatgatgtagttgcagcctgcggtggcgagcaggatcatcaggttttcgttgaggttctggtcagcgtcagcgtggttggtataacagcagtcacagcccatagagatgccgctcagcttgcccataaagtgatcttctaagccagcacggataatctggcggtcgttgtagagatactccggcccaataaagccgaccacggtgttgacgataaacggatcgtaatgacgcgccagcccgtagttacgtgcttccatcgttacctggtctgcgccgaagttagcgccagcggatagcgcagagccttgtccggtttcgaagtagaggcagttttccccggcgatacggttgaactccgcgcccactgcgcgcgcttcgtcgagcatcgccagctccacgccaaactctttcagccctttttcgctgccacagatactctggaaaatcagcccgcccggtgcgccacgacggatcgcttcgatctgggtggtgacgtgcgccagtacacagccctgagttgggatgttgaatttgtcgatcacgccatagatggtatccaacacgcggcttaagttttccacgtcgtcagtcaccgggttaacgccgatcaccgcatcgcccaccccgaaggaaagcccttcgtagatttgcgcggcgatactttgcacgtcgtcacgggtgtcatttggctgcaaacgggcgctaaaggtgcccggaataccgatggtggtattggcctttttgattaccggcattttcttcgcgccgtagatcaggtccgcgttggagcaaatcttcgctaccgccgcgaccacttcgctggtcagccctttgcgggtaaaggcaatgtcgtccacgctggtttcatcgctcagcacatactcacgcagttcgctgatgctccagtttttaatctggttgtaggccgtttcgttaacatcgtcctgaatcagccgcgtcacgcagtcatcttcataggcaatcaccggattattgcggatgtccgctacggtcatttcgctcaacacctgctttgccgccacgcgctcctgactgcttgccgctgcgacgcccgccagcacatccccgctacgcagttcgttggctttagccagcacctcttttacatccttaaactgatatacattgccgaacaatgtggtctttagtttcataagtcgttccctcaggaaggaaatgcgagacttttcaccgtcaccggcacaacgcttccgccaaaaagaggcgtaccaatgtcgatatagtcccccgcgcggacaatcacttcgtcaatgactgccaacgggagttgttgtagctgtgggcgcaacaacatgcccagagctttaccaaagtcctgcccggccaccaccagcaggggatgcggattcggaaaacgcgcgacgaaatcgaccaacgcgttgatgaccgtcagtaccgcggcgtaacgcacaggcaggctggcgggaagcgccagcacgtacgcgtcagttttgggatcaagatccagctgaatcagcgcctgttgccaggcccccaccagatccgtttcatcaatcgggatcgccaccggcaaattgcgcagcggcagttgtacgccctcaagccagattgtgctgccagagaggctaagggtatgcgcgcccgcgccaatcaccgtggcgcgcacggtttgcgccggaaactgtacgttcatctcacgcaggcgcggatggtcatgcagcgcagttgccagcagcgggccaatatcggcaaaacagaacgggtcggcgggctggtggcgataacattcgcccacgccgccagaaagcgtaatgatttcgggcgtaacacctgcgggcagcaaaccggtttgcatcaatgcctgcgcgagcggactgagcgttccgtcaatcacttcgacaatcagttctgccatccgccgggtcacctgcaccagctgcgcgccggtcaggctacgggcgtcggtgcctgcaccgaagcactcatccacaatcatctgccccggtttatgagcgtaaaccacgcgcccgtggctgtcggtttccagcaggcgaccaccgacgttgaggcaggcagtgccgctgatttttccggcatcgaacagggcgtagttcgcggtgccaccgccgatgtcgatattcagtacccgacacagccgttgttcagaaagggtttgtgccccggctccgtgaccggcgatcacggattcgaggtgcggcccggcgctggcaacgacaaaatcgcccaggctctgagagagcgccatcaccgccgggcgagcattgcgggttttcgcgctttcaccggtgatgatgatggcaccagaatcaacgctttccggctcaatacccgcagcatgatattgctcgagtattaaggttttcagttccgcttcttttaaaccgccctgtttatcgacaggggtaaagaacaccggactttgccagctaatttcgcgtttaatgaattcgtagcgcggcacctggctcaccgccgcacggttaaccagctccagccgggagaaaatcacctgggtggtggtggtgccgatatcgataccgacgctcaatagctggcgagtgttcacgattgtgcctccgcttcggtttaagtcagctttgtgcctccgcttcggttttagtcgcggtcgcgtcttcttttggcaccagcatcatcgccacgccaatcgccgttacgccgccgatcaacttgccgacaatcatcgggaagatcatggcgttcatgttggcagcggcgaagcctaagtggtcgcccagggcgaaagcagcggaaacggcgaaggcgcagttgatgactttgccgcgggtatccatctgcttcatcatgccgaacatcgggatgttgttggcaagcgttgccaccatgccggctgccgcgatgttgttcatattcagtactttaccgacgctcatcagcggtttttcaaaccagcgagtcagcagcagcaccatcggatacgcccctaacagaacgcaggagatagaaccgataacttcaatggcgcgcatcacctcaccgggtttatcgccaggggccataaagataggatccagaccggggatcagttcccagccaagcaggaatttcactaccgcagcggcaagaccgagggtgatcaatgcaacgaggaatttggcgaagatctggaagccgttgatcattttttccgggatgaatttcagccccagcgccaccagaatcgcaacaatgatcaccgggatcatgttcatcaggatcagggcgaaagtgaattccaccggctggccgttgatctgcacaccggagtacatagcaaccagaccaccagcgatacaaccaatcggaatggtcacaatgcccgccagcacgccgagcgccagataacgacggtcagaaggttcgataatgccgagcgccaccggaatggaaaacacaatcgttggccccatcatgctcccgagaattaacccagagtatagccacgcggctacgtcgccgcccgccagctctttggcgaggaagaagccgcccatatcgcacgccagcagtgttccggcgaacatgcttgggttagcgccgagcatttcgtaaaccggaataattaccggcccgagaacgtgagccagtaccggtgccagcgcggtcataccgaccatcgccaggcccagtgcgcccattgccataaagccttcttcgaactgaccgccacttccttcgatacttttaccgaacttaccgaggaaacgagcagaaccgccgaactggctcaggatcctgtctacggcagctatcagcataaagaacatcatgatgtacatgatgatttcgttaattcccatcgcctttactccctgttagttgttatttattggcggatgcggcgtaaacgccttatccgccctacatgtgcaatcccgtaggctggataagacgcggcaagcgtcgcatccggcaattgcaccgcgccactggcggatgcggcgtgaacgccttatccgccctacatgtgcaatcccgtaggctggataagatgcggcaagcgtcgcatccggcatttattgcgccgctgcgtacaggccgacaatctgctccaggctggcggtacgcgggttactgcgcagacaaatatcttccagcgcggcctgcgcccatgcgccgtaatgcgcagatgtcgcaccaacatcgcccagtcgtttaccaatcccaacttccgcaatcagctcacttaccgcgttaatagcgtcacgatcgtcggattttttagttcgcagtgcccgaccaatctgactaaagcgttcacgacaaaccatccggttaaattccatcaccgttggcagcaacatggcgttcgcgagaccgtgcggaatatgcagcgccgcgcccggctgatgcgccatcgcgtggcacaacccaagacccgcactggaaaacgccattcccgccatacaactagccagcaacatgctctcgcgcgcggcaaggtcgtgaccgtagcccaccgctttcggcaggcttttgccaatcatcgcaatggcaccaatcgccagactgtcggtaaacggtgtagcgttcagggcgctgtatgcttcaatggcatgggttaacgcatcaatgccggtcatcgccgtgacatggctcggcacaccttcggtcaatgcggcgtcgaggatcgccacatccggcatcaggctggcatgggctaacacctgcttgcgcccgctcaccgcgtcgataatcaccgttacattggtggtttcagagccggttccggcggtagttggaatggcaatcagcggcaagcgcggttgcagaacgctggtttcactcatctctgccagcgtgctatccgggttcgtcaccagcaacgtcacggctttcgccgcatccagcacgctgccgccgccaaacgcgatcaccccatcacagccactctcacgcaactgcgccacggctgcacacacgtcggtaatgcacggttcgcccaccggacatggccagagcgtcatggcgatacctttaacggtcaggctacgcgtcagcccggcggtcatccctgcctgatgcaaaaagctgtctgccatcacgaacagatgtttcagcccacgcgtttgcgcttgctgtccgcaactgctcacgctgcccggaccgcaaagcgtcaccggtggaacgctaaatgtttttacccgttgcagattcagggtatcgaacgcctgaaagagcgcggtctgcaattcattttgcatatagcccctccgctttctctcgcccactactggcgatcgccagcggggtcataaacaaactgtgctgcggtaaatgcacctgtaacgccgggaattgtttgcgaaacagttccgccacgcccggttgcatacaagagccgcccgccagccataaatcagtaatgccctgcccttcaatatgccgggcgacaatgtccgccattttttcgtacaccggtttcaccgcaggccaaatctcttcaccgtgaccgcgcttgtactgctccgcctcttccaggctaatacggcgatttccggcgagagtcagagagatgtgatgtccgccggtggcttcatccgcgctgtacgtcaccttgccctttttcacgatggcaatgccggtagtgccgccgccgatatccactacaccggcgttgtccagttgcagcagatccgcaactgcggttggctcatccagcacatggctcacttccagtccggcagattccagcacgttgatggaaatacgcgggtccgtacctggaggaaaactagtcgccgcatggctaaaacgacgaccgaattgctgctcgagcgtgtcgagatggcgacgaacaatggtgacagcgccgaagaaatcccagacgatgccgtcgcgaaccacatcggcccagtcgaggcataccgccactggctgaccgtcgcggtcgacaaccatgctcaccacatcgcaggtgcccagatccacccccagccacagcggagattccgtcgcggcgggcgtctggttacacagcgttgccgccgtttgcagacgtggggtgagccattgttcgtcgtgcgccatctgttactccttaaacaatgcgaaacgcatcgactaatacacagcgacgcagacggacaaacgtacgcgcgctggttaccccttcaccggttggcgtggtgatggtcatggtggtccagccttccccgcccagccccagcccggcaatgcacggtccgttcttaacgaaaatgctggtatcaatagcattcgccatctggttcatgttttcgatgttgcggctgtgcattgccgccgtgtggtggcaaccgccttccagtttcaccgctagcgcaatggcatccgccacgttggcgacgcgcacgacgggcaacaccggcatcatcagttcagtcacggcaaacggatgttctgcggtggtttccacaaacagcaggcgcgtttcttgcggaactttaaggccgattgccgccgcgattttgcctgcgtcgcgaccaacccagtcacggctgacggtgccttttccgcgctcgtcgatatttttcagcaacaccggttgcagctgctgcgcctgttctgcggtcagtttcaccgcgtgctggccttccatcagacgcatcagttcatcggctacgctatcaacaacaatcagtaccttttcgtcggcacaaatgatgttgttatcgaaagaagcgcctttgacgatggactgagcggcacgggcgaggtcggcggtttcatccaccactaccggcgggttgccagcgcctgcggcaatcagacgtttattggtgtgtttacgcgccgcttctactaccgcttcgccgccggttaccaccagcaggccgatacccggaaacttgaacaagcgttgcgcggtttcgatatccggatttgccacagtaaccagtaagttttccggcccacctgcggcaacaatcgcctggttgagcagcgtaatcgcccgctgggagacttttttcgccgccggatgcggggcaaaaatgacgctgttgcccgcggcaatcaggctgatggcgttgttaattacggttgccgccgggttagtggaaggcgtcacgctagccaccacgccccagggtgcgttttcaattagggtcaggccgttgtcgccagtcagcacttgcggagagaggcactcaacgcctggtgtgccgcgcgcctgagcgacgttttttgcaaatttatcttcaacgcgccccatgccggtttcactgacggcaagttccgctaaatctctggcgtgtttttcgcctgcttcacgaatggcagcaatggctaactggcgcattgccacgctttttaacccttgctgggcgactttggctgccgcaacggcgtcatccagggacgcgaaaacgcccatctcatgaacggcggcggacggcgtgtcactgctttgcattttcagcagtaccgctttcaccacctgttcaatatcctgttgattcatgatgttctgccttatttgtggaaaattacctgaccgccagacaccacctcatcgacaatgccaatcacgcacagatcgaccggactcgtttcgcttttatgcgcctggcgggcggaactgccactcaccagtaacacccactccccggttcccgcgccaatattgtcgatggcgacggcgcattgcccgtcaggattaccttgtggatcaatcatttccaccatcagcaatttgtcatgcgccagtccgtgatggcgtacggtacaaacaatttgtccagtgacgactgccagtttcatacccgcctccgtggcgtatttcaggtaaaagctccccctaccctccgcagaaggtaaaatgaaaaaggagagagcgtgacgcccgaatcgacgtcacacagggtgattacaggttgctgctatcgcctttcaggccgatcgggaagacttcttccaggtcgccgtgcggacgcgggataacgtgtacagataccagctcgccgatacgctgtgccgctgcggcacctgcatcggtcgcggctttacaggctgcaacatcaccacgaaccatggcagtacacaggccgccgccaatctgcttaacaccaaccagcttgacgcgcgcagctttcaccatcgcgtcagaagcctcaatcagtgcaaccaggccccgggtttcgatcattcctaatgcttccattgtgctttcctctttatcagggtccagaacgggaccgttcattcaaccagtgtttgtaaactgctttcgcggttcacttctgtctgacgcggcacagctgccaccagcgccagctcgataatttcctgcacgctacaaccacgagagagatcgtgcatcggcgcggcaagtccttgtatcagtggcccgacggcacgatatccgccgagtcgttgtgcgattttgtaaccaatatttccggcttccaggctcggaaaaaccatcacattggccttgccctgtagcgggctggcaggcgctttttgcgccgccacttccggcacgaaggcggcgtcaaactgtaactcgccatccaccaccagctttggtgcgcgctcacggacgatttctgtcgcctgctggacgttagcaacacaggggtgacgggcgctaccattgctggaaaagctcagcatcgccacgcgcggctcttctccggtgatggcgcgccaggtttcggcactggcaagcgcgatatccgccagctgcgccgccgtcggctgtggcaccacgctgcaatcggcaaagcccaacgccgggccgctgtactgtggcaacatcaggaaaatggaagagagcgttttacagcctggctgcaagccgataatgcgtaatccggcacgcagcacatttgccgtggaagagaggttgcccgcgatacagacatccgctttaccggcgctgaccattgctgcggcgaacatcagagggtcggtaagtttttccagcgcatccggcggcgttttttcgcccgcgcgggccagccagcgatgagcaaattcttcccgcattgcgaggttgccatgcggatcaatcacctgtagcccgtccatcgccacgccgtgactgagcgcaaactgacgaagttcaaacggattggcgaccagaatgggcgttgccagaccttgttgatgtaaatattgcgcggctttcagcacacgttggtctaacgcatccggaaaaaccactctggcgggcgctcgcaacgccagttcacgacaacgttcaataatcattgcgtttcccccagtcgttgttggatctgcttcaccgttagcggctgcttcgttacgctcaggatcatcatcacgtagaccgtgctgctaaggcggttcagcgcctgcaaaatgtccgggcgtaatacttcaaagctgcgggtgataaagacctgcgccgctacggtttcggtttcccgcactttggtgcgtagcagattgagcaacgcagcatcgcgcccgtggctggcttccggcaccagatgatcgtggtcgagatagcgcagcggctgatgagaaagccgatgcagatcttcgtcagaaagcccgacaatcgcctggcagcccagcggttcccccagcgcatcggcgcgcataatgttgccaagacggctacggatatccgccagccacggctgccacggttccgccagttcaatttgcagccacactgccagcgcaatggtgctgtcgagaaccgcgcgaaaacccagacgcggatcgcttttggcgaccattttttccgcgctcaggtgagtcagcgtatccggcttttttgccaccggctggcgacacagttcgcagcacgcctgcggatgttcatcgctactggtcagcccatgaacgggctgcggctgctgctgttcatcgtcaacaaacaggcggccctgctcgtcaataaacttgatgcgcagatggcggctttccagcaactcccgggcagagggcgtcaggcgactgtccgcagggagatggatctctgcgccttcgctgagcgtatggttcgctcttagccatgcttcggtgatgaaatctttcatagggattgccagttagccggccaggcgacatacaggaatttcacgctggatgtcgtaccaaattcgatgctggagcctttcgggataaacatcacgtcgcctgctttggcgatcatggtttggccttcgtggcgaacatgcagctccccttccagcaccatgtcgatttcgtcgtagttcagggtccacgggaagaatgcgttctcccactgcataaaaccggcggccatgctgctgccgtcgtctccggtcacaagatcagtcaagcccacgcaatgcggctctgcgccgtcgaaacgaccaaacttgacgctactgccatcaatcactttgatgccgcctttgccggtcacgcttttgaagctcggctgcattgcgccctgctccaggctctgtttttccttcatcactttttccatcagctgtgcgaccaggctttcggtaaactggccttccggcagctgggcaatgatggtttcgcggatgcgctggctttcggttttgtcggctggcacgctggcgggcacggacgccgttaccgggatgctttcatcacattcggtgatggtaaaacccagtagatccgccacttcacgggcttccggggtaataatgctggcgcgcagaaccacggacattgcctgttcgccgcgcgcgtgtgcttcacgaatatcattcgctgtgatgagttttttcacctgcttcctcctgtttggtgagagatgccagataatccaccagttgctgcacgctttgcgggtcgtggctgtttagctcgaacatcggctcttcgaaacccgtctcaagcaataactttcgcgttgcggcgacgtcagcatctggcatgtccgttttactgatgacggcgatttgccgtttgctgacgccaatatccagcaacccggcaggcaaccgactttccgggtcatttgcgccatggacatagatcagcatgtctacatcctgtagcgtggtaattaaggcgtgataccagcggggatggttaaaatattcacccggcgtatcaatatcgcccttatcattaaattccacggcctgtgtttttctggcgagggtataattcccctgcaacgcattaaataacgttgtttttcctgccccgacgctacccacaaacgcaattcgtttcatgaatgcctcgtattaacttttggtcatttcacaaagcgtataatttaataagcgacctaaaccgctgacggtttgacttaacgcttcttctactgcgcccacgctgccataaatcaccaatgcaccgctgaatcggtcgagaaaaccgatatgcacatcagcggctttcagcgctaaatcaccggcgatcatcgccgtttcgccgggagttagcgtcataatgccaattgcgcccgcatccggaacgccgattttcttcgccagttcctcaccgggatgcgcgatgagatgcgccagtgtgacctgtttgccgggcacaaattcctgaatgatgcgttctttatccatgagtcgccgcctgtgaaaaactttcgtgtatcgtgacaatttttcgtcagagtaaataacaaaattcggcaagcgcgtttaaaaggtgaggtagatcactaagaatggagagatattcgctgtggtgcataaactttcatatgcaacgcatgaatataaataaaataatatcgagatattatatagactgcttttttttattattcgcaaactcagtaataagctttactaatatattgcagctaaactgcttaccctgaatattcagggtaagcgtgagagttaaaaaaaattacagcggttgggtttgcgcttctaccacggccagcgccaccatgttgacgatacgacgcacgcttgcgatcggcgttaacacgtgaaccggtttcgccacacccatcagcaccgggccgacagtcacaccttcgctgctggaaacacgcagtaagttgtaactaatgcgggcagcttccatgttcggcatcaccagaatattggcggaacctttcaaagagctgtccggcatacggtcgttgcgaatcgcttccaccagcgctgcatcgccgtgcatttcaccatcaatcatcagttctggtgcacgttccctgaccagttccagcgcctgacgcattttgctgctgctcgggcagtcagaagaaccaaagttggagtggctcaacaaagcaacgcgcggctcaataccaaaacgacggacagtttctgccgccatcaaggtgatctccgccagctcttctgcatccggttcatcattaacatatgtatcggcaataaaggtgttaccactcggcagcagcagcgcgttcatggcacctgcggtgtgaacgccatcgcgataaccaaagacatttttcaccacgctaaaatgttcatgataatcacccaccgtaccgcaaatcattgcatcggcttccccacgctgaaccatgatcgcgccgatcactgtcgggttactgatcagcgcccgctgcgcctgttcctgagtgacgccgcgacgcttcatgatctggaagtattcggtccagtactctttaaagcgcggatcggattcgttattgacgatctcaaaatcaacgcccgctttgatctgcaagcccagtttctgaatgcgcatttcgatcacgttcggacgaccgataaggatcggtttcgccagtcccagcgttaccagttcctgagtggcatgcagaacgcgcgcctcttccccttccggcagaacaacgcgcttcggcgctttgcgagcctgggagaaaatcggcttcataaacaggttggttttgtaaacgaactcagtcagcttgtcgatgtagacgtcgaaatcagcaatcggacgagtcgccacgccgctctccatcgcggctttagcgaccgcaggagcgatcttaacgatcaagcgcggatcaaacggctttggaatgatgtattccggaccaaagctcagatcctgatcgccatacgcactagccaccacttcgctctgttccgcatgggcgagttctgcaatcgcacgtaccgccgccagtttcatctcttcgttgatggcggttgcgccaacgtccagcgcgccacggaagatgaacgggaagcacaggacgttgttcacctggttcggatagtcagaacgaccggtgcaaatgatggcatccggacgcacttctttcgccagcggcggcagaatttccggttccgggttcgccagcgccaggatcattggcgcacgagccattttcttcaccatttcctgggtcagcactttcgggccggaacagcccaggaaaatatccgcgccttcaatcacatcatcgagggtacgtttgccgtcatccaccaccgcatatgcggctttggtttccgccatgtttggctcacggccctgatagataacgcctttactatcgcaaaccacgatgttatgtttttgcagacccagcgctaccagcaggttcatacaggcgattgctgcggcacccgcgccggaaaccaccatccgcacgtcggagatgtttttctccaccacgcgcaagccgttgaggatggcggcagtgctgataattgccgtgccgtgctgatcgtcgtggaataccggaatattcatccgctcgcgcagtttctgttcaatatagaaacattctggcgctttaatgtcttcgaggttgatgccgccgaaggttggttcgagcgcggcgacaacttcaataaatttgtccgggtcgagttcgtcaacttcaatgtcaaatacatcaatcccggcgaatttcttaaacagaacgcccttgccttccatcaccggtttgcctgccagcgcgccaatgttgcctaaccccagcaccgccgtaccgttagagatcaccgccaccaggttacctcgggcggtatatttgtaggcttttaacgggtctttttcgatttcaagacaaggtgcggcaacgcctggactgtaggccagcgccagatcgcgctgtgttgccagaggcttggttggagaaacctggattttccctggaactggaaattcatggaaatcaagtgcactttgttttaactggtcatccatttggttgttcctttcacgtaacgttcacaaataaagtgtgtgggcaacagcccctgcccacaacgtggcgcacattattaccctgccggagtctacagactttgagcaagtccaaactctcaccattaatataatgttttggtaataatcctataacactgatgttacctgcttaatccagcaataccatgcctgtctgctatgcttttttgatgcgtttagcgaaatttctcagaagtgtgaattaacgcactcatctaacactttacttttcaaggagtatttcctatgaacgagttagacggcatcaaacagttcaccactgtcgtggcagacagcggcgatattgagtccattcgccattatcatccccaggatgccaccaccaatcctagcctgttactcaaagctgccggattaagtcaatatgagcatttaatagacgatgctatcgcctggggtaaaaaaaatggcaagacccaggaacaacaggtggtcgcagcgtgtgacaaactggcggtcaatttcggtgctgaaatcctcaaaatcgtacccggtcgcgtgagtacagaagttgatgcacgcctctcttttgataaagaaaagagtattgagaaggcgcgccatctggtggacttgtatcagcaacaaggcgttgagaaaagtcgcattctgatcaagctggctagcacctgggaaggaattcgcgcggcagaagagctggaaaaagaaggtattaactgcaacctgacgctgctgttttcttttgcacaggcacgggcctgtgcggaagcaggcgtttttctgattagcccgtttgtcgggcgtatttatgactggtatcaggcacgcaagccgatggacccgtatgtggtggaagaagatccgggcgttaaaagcgtgcgcaatatctacgactactataagcaacaccactatgaaaccattgtgatgggcgcgagcttccgtcgcaccgaacaaatcctcgccttaaccggctgcgatcgactgactatcgcaccgaatttactgaaggagctgcaggaaaaagttagcccagtggtacgtaaattaatcccaccttctcagacgttcccacgcccagctcccatgagcgaagcggagttccgttgggagcacaatcaggatgcgatggcggtagaaaaactgtctgaaggcattcgtctgttcgccgttgatcaacgcaaactggaagatcttcttgccgccaaactataaaccagccacggagtgttatatgtcccgaaaagaccttgccaatgcgattcgcgcactcagtatggatgcggtacaaaaagccaactctggtcatcccggcgcgccgatgggcatggctgatattgccgaagtgctgtggaacgattttcttaaacataaccctaccgacccaacctggtatgatcgcgaccgctttattctttccaacggtcacgcgagcatgctgctctacagtttgctacatctgaccggttacgacctgccgctggaagaactgaagaacttccgtcagttgcatagcaaaaccccaggccacccggagattggctatacgccaggcgttgaaaccaccaccggcccgcttggacaaggtttggcgaacgccgtcgggctggcgatagcagagcgtacactggcggcgcagtttaaccagccagaccatgagatcgtcgatcacttcacctatgtgtttatgggcgacggctgcctgatggaaggtatttcccacgaagtctgtagcctggcaggcacgctgggactgggcaagctgattggtttttacgatcacaacggtatttccatcgacggtgaaacagaaggctggtttaccgacgatacggcaaaacgttttgaagcctatcactggcatgtgatccatgaaatcgacggtcacgatccgcaggcggtgaaggaagcgatccttgaagcgcaaagcgtgaaagataagccgagcctgattatctgccgtacggtgattggctttggtagcccgaataaagcaggtaaggaagaggcgcacggcgcaccactgggggaagaagaagtggcgctggcacggcaaaaactgggctggcaccatccgccatttgagatccctaaagagatttatcacgcctgggatgcccgtgaaaaaggcgaaaaagcgcagcagagctggaatgagaagtttgccgcctataaaaaggctcatccgcaactggcagaagagtttacccgacggatgagcggtggtttaccgaaggactgggagaaaacgactcagaaatatatcaatgagttacaggcaaatccggcgaaaatcgctacccgtaaggctagccaaaatacgcttaacgcttacgggccgatgctgcctgagttgctcggcggtagcgcggatctggctcccagcaacctgaccatctggaaaggttctgttagcctgaaggaagatccagcgggcaactacattcactacggggtgcgtgaatttggcatgaccgctatcgccaacggcatcgcgcaccacggcggctttgtgccgtataccgcgacgttcctgatgtttgttgaatacgcccgtaacgccgcgcggatggcggcactgatgaaagcgcggcagattatggtttatacccacgacagtattggcctgggcgaagatggtccgacgcaccaggctgttgagcaactggccagcctgcgcttaacgccaaatttcagcacctggcgaccgtgcgatcaggtggaagcggcggtgggctggaagctggcggttgagcgccacaacggaccgacggcactgatcctcagtaggcagaatctggcccaggtggaacgtacgccggatcaggttaaagagattgctcgtggcggttatgtgctgaaagacagcggcggtaagccagatattattctgattgccaccggtagtgagatggaaattaccctgcaagcggcagagaaattagcaggagaaggtcgcaatgtacgcgtagtttccctgcccagcaccgatattttcgacgcccaggatgaggaatatcgggagagcgtgttgccttctaacgttgcggctcgcgtggcggtggaagcaggtattgccgattactggtacaagtatgttggtctgaaaggggcaattgtcgggatgacgggttacggggaatctgctccggcggataagctgttcccgttctttggctttaccgccgagaatattgtggcaaaagcgcataaggtgctgggagtgaaaggtgcctgatggtgattgccggatgctgattgccggatgcgacgctgacgcgtcttatccggcctacagcgtcttatccggcctacatgtcccgccattttgtttaacgggtgatccacaacgtgggccaggcgtctggcccatgccagttatcgcaggtgggttctgcggcgtaacgcaccaggcgaaaacgctgaccgtcaaagcgccagcgcgcctgaatgccacaatcgcttaatccgcgccctttcgctaaggtcaccagttcacggcttttctcatcaaatgttgcgttcatcagttccagttcattcgtctcctgaccgttgttgaacggcaaacgcaaccgaaccgggcggctagctagtggctttttacggctcacaatccatgccaaatcaatggtgttataggcccctgcctcacagctaatcatcatcagcgctttatcatcagtcagcgcagtgacattcacctcacgacgcaatggatcaaggctgcagcgcagaccattcatccgccagtttccataatccagcaaatcgttgcgttcttcgagactgagtggcgtcggcgttgggttaaccaccgcgacctctttcagcgcaggcgcgggcggtacgctgagcggcggttcgtcccctttcttgatccacgcggtttcactgccaacgcgcttttgctgagcatcaataaacaacaacgctgcttttaagccactcagagaaatggtctgatcgccatcgcgtaaggtgattgccttcccttcctgaatcatctgcaaaaacgcggtgatggttgccgtatcatcggttactaataaccatggactaatccgccacttgtcaccacttaacgccaacggctcgccatctaacagcagccgtggcgctatctccccttcactcgcctccgggctcttcaatccgccgcgctcaatacgtaaaacggcatcggtatgcgccccggcgctgcggctcagggtcatcaccagtccattatgatcgcccgtattacgcgccacgcagaaattttggttattacaggtgacctgccagtcggaaaacgcccgttgcgctggtgccgcccacaccaaagacgtcggcaacaaagcgaaaaaaaagagaaggaaaatgcgatagcgcatggacggtacgaccccagaagttcaaacaaacagcacaagtcgtatcttcgttgcgcaggtagcgcggctcaatcggatttgtcggattgagccaataataaacaacgaaatattattgttatttttcagtccattaaatgactcgtttgcaaatagttaagcaataacaccgtcttaccgtcacgtatctcgccggttttgatcatctccagcgcctggctgaacggcagctcgagcacttcaatatcttcatcttcgacaccgccaccggcgttagcgcgctgattgtcactgtattcggcgataaaaaagtggattagctcagtcacaccgcctgggctcatatacagttcaaataatttgcgcacttcacccacttcatagcccgtctcttcaatcgcttctttgcgaatacacacttccggttcgtcgttatccagcagcccggcgcagctttcaatcagctgcccgctttcattgccattaacccaggtagcgacacggaactgacgaatcagaaccacggtctttttcttcgtgttgtacaggaggatcgtcgcaccattgccgcgatcgtacacttcacgtttatggcggataacttcgccgtctttgcgcgtgagatcgtaagtaatgttgtgcagggtgaaatagttatcggagagaattttgtctttaatgagggtgatttgttgcgtcataccgactccacagcgcgaaatgaacaattatcttacgctgtgaagtcgggtttgtctgcgcaggctatcagtgagatttgacactttttacccccagccagtcaataatcccctgtgccgcatgacgtccttctgccattgcggtaaccaccagatccgcaccacgcacggcgtcaccaccagcgaagattttcggattggtggtctggtaacggtactggctttccacatccgcgatgatgcggccccatttgtctaccgttacaccgtggctctccagccacggcatcccgtgcggattgaagccaaacgccataatcaccgcgtcggctggcatgacaaattcactgccttccaccggcactggacgccgacgcccctgggcatccggctctccaagacgcgtgcgcaggaaacgaatcccgcagacgtgaccttgttcattcagctcaagcgccaccggctggacgttaaattcgaagttggccccctcttcgcgggcgttcttcacttctttcttgctgcctggcatgttagcttcatcacgacgataagcgcaggtgacgttactcgcgccgtggcgcagtgcggtacgcacacagtccatcgcggtgtcgccgccgcccagtaccacgacgttaagtccggcggtattgataaacggctcttccggtagctcttcgagccccatcacctgtttagtgttggcaatgaggaacggcagcgcgtcataaacgcccggcgcatcttcattgggtaaacccgctttcatggaacggtaagtgcctacgccaacgaagaccgcgtcgtattgttccaaaaggctatccaaagagacatctttacccacttcacaattgagttcgaagtgaatccccatcgcgctgaagatttcccgacggcgtgccagcagggatttatccagtttgaaagaaggaatgccgaaagtgagcaagccaccgatttctggatggcgatcgtacaccgtcacccccacgccattgcgggtcagaacatccgcacaggccagccctgccggacctgcaccgataatcgccacccgcttgtccactttggtgacatggcttaagtcaggacgccaacctttcgccaacgcctgatcactaatgtagcgttcaatgttgccgatagttaccgcgccgtgctcatcgcgaatagtacaggcaccttcacacaaacggtcttgcggacaaacgcgtccggtaatttccggcagggtgttggtctggtgagaaagctcgacggcggcgtcgatgtttccggctttcaccagttcaatccactgcggtatatggttatgcagcgggcaggtccattcacaaacgctgtgctcgccgcacttaaggcagcggctggcttcccgttgtgcctggtcggcgcgaaatggcagataaatttcatcaaaaccggttttgcgcgcttcaatcgccagtttatccggctcgccacgcgcgggcgttgcctgcatttgttcgactttactcattaccggcatttcttgcgccgcggtactggcatgccacggttgatgttcctgacgcgcggtgcgcaagcggcgggatttcgccatgccggagagtgcgacgtcagtgaccagttgcagcgcgtccgccgggcaattctcaacacaggcaggaccgttttcgcgccccgcacaaaggtcgcatttatgcgccgtggcttttacttttcctgccgcgacgggtgtcaggacgatttgcatcgtaccaaaaggacaggccaccacgcaggatttacagccaatacacttttgctgattgacctgaatgctgtcatcaacgtggctgattgcgccattagggcagctacgggcgcagggcgcatcttcacaatggtgacaggtcactgcactacgttgctgttgatgtttgataaccgtaattcggggatgaaaatggtgttggctcaggacatgttgctcatcattgtgagccatgacacaggcgatttcacaagcatgacaacccagacattgctgactgttggccataataaaacgattcataacgaccttcttttttggttgtaaaaaccttattctttatatgagtgttgttattacccgacttacaggggaatcggcaatgttcatgtgcccagaataagtaactatttcgctataaactgtggcagatcaaataatcccatcactgactaaattgcgtttcagcgaactggaacattaatgattttttgtggagaagacgcgtgtgattgttaaacgacccgtcagcgccagtctggcccgggcctttttttacattgtgctgctgagcattctttccacgggtatcgctctgctaactctggcgagcagtttgcgcgacgctgaggctatcaatattgccggaagcctgcgtatgcagagttaccgcctgggctacgacttgcaaagtggcagtccacaactcaatgcacatcgccagttatttcagcaggcactgcatagtccggtattaaccaacctcaacgtctggtatgtgccagaagcagtaaaaactcgctatgcgcatctgaatgccaactggctggagatgaataatcggctcagcaagggcgatttgccgtggtatcaggccaatattaataattatgttaatcagatagacctgttcgtactggctttacagcactacgctgaacgcaaaatgctgctggtggtggcgatttccctggctggcggcatcggtattttcacgctggtcttttttactttgcgccgcatacgccatcaggtggttgccccgctgaatcagctggttaccgccagtcagcgtattgaacacgggcagttcgacagcccgccgctggataccaacctgccgaatgagcttggtctgcttgcaaaaacctttaaccagatgagcagcgagctgcataaattgtaccgtagcctggaagcgagtgtagaagaaaagacccgcgatctccacgaggccaagcgtcgtctggaggtgttgtatcagtgtagccaggcgctgaacactagccagattgatgtgcattgtttccgccatattttgcagattgttcgcgacaatgaagcggctgaatatctggagttaaatgtcggtgaaaactggcggattagcgaagggcaaccaaacccggaattgccgatgcagattttaccggtgacaatgcaagagacggtttacggcgaactgcactggcaaaatagtcacgttagtagtagtgaaccgctgcttaacagcgttagcagcatgctgggacgcggtttgtactttaatcaggcgcagaagcattttcagcaattattgttgatggaagaacgtgcgaccatcgcccgcgaattgcacgacagcctggctcaggtactttcttacttacgtatccagttgacgttactgaagcgtagcataccggaagataacgccaccgcacaaagtatcatggccgatttttcccaggcgttgaatgatgcttatcggcagttacgcgagctgttgactactttccgcctgacgctgcagcaggcggatctcccctccgcattgagggaaatgctggatacgttacaaaatcaaaccagcgccaaactgaccctcgactgccgtctgccaaccctggcactggatgcgcaaatgcaggtgcatttgttgcaaattattcgcgaagcggtgctgaatgcgatgaagcacgccaacgccagcgaaatcgccgtcagttgcgtcaccgcgccggacggcaatcacacggtttatatccgtgataacgggattggtatcggtgaaccgaaagaacccgaaggtcattatggtctgaatatcatgcgcgaacgcgcggaacggctaggtgggacgctgacttttagtcaaccttccggcggcggcacgttagtgagtattagctttcgctctgcggagggtgaggaaagtcagttaatgtaatgcctcctactgaccaaagaatacttgcacttaaggttcagtataaaagggcatgataatttacattaactcctttttttctccacgattggctcgtaccttgccgctacagtgaagcaagtcaagcctacaacgatacgcagaaacacgaggtcctcttttaatggcgaatttctttattgatcgccccatttttgcctgggtgctggcaatcctgttgtgtctgacaggtaccctggcgatttttagtttgcccgttgaacaataccccgatctcgcgccaccgaatgtgcgagtgaccgctaactatcccggcgcaagcgcccagacgctggaaaacaccgtgacccaggttatcgagcaaaatatgaccggcctcgataatctcatgtatatgagttctcagagcagtggcaccggtcaggcatctgtcactttaagttttaaagcaggcaccgatccggacgaagccgtgcagcaagtacaaaaccagctgcaaagtgccatgcgaaagttaccgcaggcggtgcaaaatcagggcgtgacggtgcgtaaaaccggcgataccaacattctgaccattgccttcgtctctaccgatggtagcatggataaacaggatattgctgattatgttgccagtaatattcaggacccgttaagccgcgtgaatggcgtcggggatatcgatgcctatggtagccaatattccatgcgtatctggctggacccggcgaaactcaacagtttccagatgacggctaaagatgtcactgatgccattgagagtcagaacgcgcagattgcggttgggcaacttggtggtacaccttccgtcgataagcaggcgctcaacgccaccattaacgcccagagtctgctgcaaacaccagaacagttccgcgatatcaccttgcgggtcaatcaggacggcagtgaggtaaggctgggcgatgtcgccaccgtcgaaatgggggcggagaaatacgattatcttagccgcttcaatggtaagccagcctccgggctgggggtaaaactggcctccggcgctaacgaaatggcgacagcggagctggtgctcaatcgtctcgacgagctggcgcagtatttcccgcatggactggaatacaaggtggcgtatgaaaccaccagctttgttaaagcctccattgaagacgtggtgaaaacgctgctggaagctatcgctctggttttcctcgttatgtatctgttcctgcaaaacttccgcgccacgctgatacccactatcgccgtgccggtggtgttgatgggaaccttctccgtactttacgccttcggttacagcgtcaacaccttaaccatgttcgcgatggtgctggcgatcggtctgctggtggatgacgccatcgtggtggtggaaaacgtcgaacgtattatgagtgaggaaggactcactcctcgcgaagccacacgtaaaagcatggggcagatccagggggcactggtcgggattgcgatggttcttagcgcggtatttgtaccaatggccttcttcggcggcaccaccggtgccatctatcgccagttctctattaccattgttgcggcgatggtgctgagtgtactggtagcgatgatcctcactccggctctgtgtgccacactacttaagccactgaaaaaaggtgagcatcatgggcaaaaaggcttttttgcctggtttaaccagatgtttaaccgcaacgccgaacgctacgaaaaaggggtggcgaaaattctccaccgtagcctgcgctggattgtgatttatgtcctgctgcttggcggcatggtgttcctgttcctgcgtttgccgacgagcttcttaccgctggaagaccgtggcatgtttactaccagcgtacagttgcccagcggtagtacgcaacaacagaccctgaaagtcgttgagcaaatcgagaaatactacttcacccatgaaaaagacaacatcatgagcgtgtttgccaccgttggttctggccctgggggtaacgggcaaaacgtggcgcgaatgtttatccgcctgaaagactggagcgaacgcgacagtaagaccggcaccagctttgccattatcgagcgtgcaacgaaggcgtttaaccaaattaaagaagctcgcgttatcgccagcagcccgccagcaattagcggtcttggtagttctgcaggttttgatatggagttgcaggaccacgctggagcgggtcacgatgcgctgatggcagcacgtaatcagttgctggcgctggcggcggaaaacccggagctaacccgtgtgcgccataacggcctcgacgacagtccgcagttgcagattgatatcgaccagcgtaaagctcaggcgctgggcgttgctatcgacgatattaacgacacactgcaaaccgcctggggtagcagctatgtgaatgactttatggatcgcggtcgcgtgaagaaagtctatgtgcaggcagctgcgccgtatcgcatgctgccagatgacatcaatctctggtatgtccgaaataaagatggcggcatggtgcccttctctgctttcgcgaccagtcgctgggaaacaggcagcccgcgtctggaacgctataacggttattctgcggttgagattgttggggaagccgcaccgggggtcagtaccggtacggcgatggatattatggaaagcttagtgaagcagctgccaaacggctttggtctggagtggacggcgatgagctatcaggagcggctttccggcgcgcaggctccggcgctgtacgccatttccttgctggtggtattcctgtgtctggctgcgttgtatgaaagctggagcgtgccgttcagcgtaatgctggtcgtgccgctgggggtaatcggcgcgctgctggcaacctggatgcgcgggctggaaaacgacgtttacttccaggtgggcctgttaacggtcattggtttaagcgcgaaaaacgccatcctgatcgtcgagtttgctaacgagatgaaccaaaaaggccacgacctgtttgaagcgacgctccacgcctgccgtcagcgtttacgcccgattctgatgaccagcctggcatttatcttcggcgtattgccaatggcaaccagcacgggtgccggttccggtggtcagcatgcggtgggtactggcgtaatgggcgggatgattagcgccactattctggctatttacttcgtgccgctgttctttgtgctggtgcgccgccgcttcccgctgaagccgcgcccggaataagcaataaaaaaggcgacatgccaatgtgtcgcctttttcaactttccgattaagaacctgctcagcgggttcttgctgtttgtactttgtctcaggaattacttacgaagcataacttcgataaagtctttccagttccccagttcacgttcaatcataacaacctctcttataattatgggtattctacggaaacaatataccgtggtgaagctaatttactcgattgctgcgatgactacctccgggggacaaatcttatgtaaatactatggtcctgcggtgatgatttgtatgtgatacacagcaacatttcgagatattcatacggcatctaatactgatttaattctggttaaaatacagacagataacaagatgaatattcttaatgtttacgttaaaaatgtttaatattatttaatagttgttaatttgaatacttcgataatgttatatttcctgataatcatttgcaggcaaaatgttttcacccttaaatgagtatttattctcataaatcgaaaaaggattcattatggttacactttacggtatcaaaaattgtgacaccattaaaaaggctcgccgttggctggaagccaataacatcgactatcgttttcatgattaccgcgtcgatgggctggacagcgaattattgaacgattttatcaacgaattaggctgggaagcgttactcaacacccgtggtacaacctggcgtaaactggacgaaaccacccgcaataaaatcaccgatgcggcctctgcggcggcattaatgactgaaatgcctgcaattatcaaacgtccattgctctgcgtgcccggtaagcctatgctgctgggtttcagtgattccagttatcagcaatttttccatgaggtgtaatctatgagctgcccggttattgagctgacacaacagcttattcgccgcccttccctgagtcctgatgatgcaggatgccaggctttgttgattgaacgtttgcaggcgatcggttttaccgttgaacgcatggactttgccgatacgcagaatttttgggcatggcgtgggcagggtgaaacgttagcctttgccgggcataccgacgtggtgccgcctggcgacgccgatcgttggatcaatcccccgtttgaacccaccattcgtgacggcatgttattcgggcgcggtgcggcagatatgaaaggcagcctggcggcgatggtggtggcggcagaacgttttgtcgcacaacatcccaaccatacggggcgactggcatttctgatcacctctgatgaagaagccagtgcccacaacggtacggtaaaagtcgtcgaagcgttaatggcacgtaatgagcgtctcgattactgcctggttggcgaaccgagcagtatcgaagtggtaggtgatgtggtgaaaaatggtcgtcgcggaagtttaacctgcaaccttaccattcatggcgttcaggggcatgttgcctacccacatctggctgacaatccggtacatcgcgcagcacctttccttaatgaattagtggctattgagtgggatcagggcaatgaattcttcccggcgaccagtatgcagattgccaatattcaggcgggaacgggcagtaacaacgttattccgggtgaactgtttgtgcagtttaacttccgcttcagcaccgaactgactgatgagatgatcaaagcgcaggtgcttgccctgcttgaaaaacatcaactgcgctatacggtggattggtggctttccgggcagccatttttgaccgcgcgcggtaaactggtggatgcggtcgttaacgcggttgagcactataatgaaattaaaccgcagctactgaccacaggcggaacgtccgacgggcgctttattgcccgcatgggggcgcaggtggtggaactcgggccggtcaatgccactattcataaaattaatgaatgtgtgaacgctgccgacctgcagctacttgcccgtatgtatcaacgtatcatggaacagctcgtcgcctgatgagtggttctgcaagaggaaataagcatggactggctggctaaatattggtggattctggtgattgtctttttggtaggcgtcctgctgaacgtgattaaagatctcaagcgcgtcgaccataagaaatttctcgccaacaagccggagcttcccccgcatcgtgatttcaacgataagtgggacgatgacgacgactggccgaaaaaggatcaaccgaagaagtaagctgagtgctcaaccgtaggccggataaggcgttaacgccgcatccggcaatggtgaacgatgcctgatgcgacgctcacgcgtcttatcaggccaggtaatctgtcttttacatcatttcaatcacatcatcatcgccaggcttaccgccacttagcgcttcgtcgaaataatgtttcggaatggtataacgcaagtgatccagggcaaattgcatactgcgattgtcgatcgcatggcctaaatcctccacgatatccagcgtcacgtcaccaccggcactgattaacgcttcctgcgccgcaaccgcatgcgccagatcgataaccggatcttcaccgccatgaatcaggtgaattgtcgtggctgtagacgcagtttccggcaggctcgcatagcgtccgttaaaagcaatgacgcgactagcaaggcccggttcggctttaatgctctccagcaccataatcgcgccttgagagaaaccgatgagcgccgtggcgttagcccctactccgctctgtttctgccagtagcgcaccgtttcaataaacgtcggcatgatcgcatccacacgcgcctggcgattatcttccgtaataccctgcacgctaaaccactgacgccccgccggattaccgctcggctccgcgccaccgacactcaccaccagcgcatcaggaaacagcggtgcaaaccagttgcctatttcccccattgccaccgggttatccccgacaccgtggaaaagcagtaacaactgttgcgcaggtttatccgggctttgaacaacaaaatggtcatgtttcatggcgaactccttaactgatgtcattaattttacgccgctgactcacaatgaccatgagataaaattgaaggagtcagtgaaataattgccattgcgttatgcgatcgcgcagacgctcagtgcgaacatcattaagtgcgaacagcgcctgcgcggcctcttcccgctgacggaccagtaacatcttgcggccactaagtttaagtgtggtacataactgcgcatcactggcgtttttctgtaaacgcccacgcagcgccggtaatgccagttcactggtttgtaacagacgcaataagcaacctaagctcgttaatagcggacgatgagcgaaagcaaaaccggccagttcaagccagtcgtcgtcagaaaggacggcatcgtttagtggatcaacaggaagcgtttcgccattccactgcgcgagagcttgcgcatcgcgacgtaaacggtaatgctcacgttcagccagctgtttacccgcatcactcatcggtaacagcgccatcgccgtatagcaaccgctgctggcttcccgatgattacccatccgcaccagcacaaaaccgcagcgttgccagaaacgccataactccccggtgtaaccaaaactcacgctaagatagtcgaggtcttgcgtatattgcaaagcaccagcaataagttgccgccctgtgccttcccgctgacgagccggatgaactgctatccggctgacccgccgtccacgcaatgtcgccgccagtggattgttgccgtgcgccgccaggctctgggccaccagattaccccgcgggcgacgaaaacctgcccataccgcctgactgagttgttgagataatccaccctcatccaccagccacagcgccccggcaatctcgttttcgccagccgcctgtaaaaaatgttgccctggtgcatccatcatccggcgtaaatccagcgggctagtccgatagtgcgcaccagacaagagctgataaacctttaacggcgtttctggatcgctttgccataacgtctgttcaaatgcggaaatgacaatattgccttgtggtgtatgggtgaagttttcatcgtcaaaaaccagtgcctcgctgaccattttttccagcgggcatccctgcgcccagcggatcggctgttgcagttcaaaacggtgtaaatgcggaaagcgagcgcaaaatttcagcaaaaaaccacgtccggtgccttcgtagccctgcaccgtagtggttaacaacgttcgaggaaaacggcttaccagttgatgcaacaatggcgcaggtatggctgcggcttcatcgaccaccagccagtcggcttgctcatcgctggctaacaaggcatccggcgcaataaagcgaaacttctcgcccgcaaattgtgccagtacatccgtactcgcttttgcgggcgcggtgacaatcgctctgcccgcaatacgagaaatgagttgccctgccaacgcgctcttaccgcgcccacgcgcagccgttaccgctgccacgcccggcggcatggtcattagctgctttaagagttgctgttgttctggttgtggtgcgccagtcgcggggtaccagtcagtacggggagtaaaatgcgccaagctgaatggctggttttgccgccagaggatagcctcgttatccgccgtaagtacgcgtttgagatgctggacaaaatgcggcgtcgcaatagggtcagggcaatcactccagcgcaggctgtcggcatcaggttggttttcccactcttcccatacagggagtaacaaaaccagccagcttcccgctttcaacgttccgctaagtgcggcaaaggcagcggcatcaaagccgtggcgggcgtcgaataccgcatgccggaactcgcgcccaagtaaagtttgtagtgcgctgggagaacagtggttttcagcatctggccgcgggctaatccacagccagtcgccaggtaaggcatcacgcaacttaagagtatgctcaaaacaccaaccctcttccccgctcaacaccagcaagcggcggatcccttcacgtttcatttgcgctgttaatgtgtgaagcgcagtcagttcagccatccctgccccggaagttaaatgcttttaccaaaagtattgcattgtgccggatcgccgctgtcgaaaccacgtttaaaccagctgtagcgttgctgagaagtgccatgagtgaaactgtctggtactactcgcccctgactttgctgttgtaaacggtcatcgccgatggcctgcgccgcgttcagcgcctcttccagatcgccggtttccagaacgccttgctgctgcatactatgcccccagacaccggcaaaacagtcggcctggagttccatacgcacagataagcggtttacttccgcctgcgtcgcgttttgttgcagttgacgaactttcggctcgatgcctaacagtttctgcacatgatgaccgacttcatgggcgataacgtacccctgggcaaaatcgccatccgcgccaagtttgtctttcatgtcatcatagaaggagagatcgatataaaccgtgccatccgccgggcaatagaacggccccattatggactggcccgccccgcagccggtacgcgtcattccacggtacatgaccagcttcggttgctgataggtcttacccatcttctcgaactgttgtccccaggtgtcttccgtggttgccagaatcacgctggtgaattttgcggcttcgtcttcatttgggctaatactccgcgtactttgttgttgggaaaccggctgcccggtcatcaacccggttaaatcaacaccatagtagcctgcaaccagcacgactatcagtaaaatcagcccgcctttaccgcttggcaggcgaaaaccgggaccgcccatagatggaccaccagagctgttgcgcctgtcttcaacattgtcactttcacgtcgcccttgccaacgcatagatacctcaacaatatattcattatagaaatgatcgtaggtggttcagaggaagattaccacaggaaagcgggatgaaatggcggaggaatgagcgttcaatgcatatattccgagagcggttgtcttgccgtgccagctgcacggcaagatgatgaacagaaaaatcagtccagctgtacacccaggcggcgggcgacggcttcataggcttcgatcaggccaccgaggctctggcggaaacggtctttgtccattttctccagcgtttctttgtcccacaggcggctaccgtccggggagaactcatcacccagtaccacttcgcctttgtacagaccaaattccagcttgaagtcgaccagaatcagaccagcatcatcgaacagttttttcagcacgtcgttcgctttgtaggtcagctctttcatacgcgccaggttctctttgctcacccagccaaaggtttcgcagtaagattcgttgaccatcggatcgtgcatggcgtcgtttttcaggaacagatcgaacagcggcgggttcagctcaataccttcttcgattccaagacgtttcaccagagagccagcagcacggttacgcacgacacactcaaccggcaccatatccagctttttcaccagacattcggtatcggagagcagacgctccatttgagtcgggatacccgcttcagccagtttgctcataatgaagtagttgaacttgttgttcaccatacctttgcgatcaaactgctcaatgcgcgcgccatcccctgcactcgtatcattgcggaattcgagcaccaacaggtccgggttttccgtgctgtatacggttttcgctttaccacgatacaactcagcttgcttttgcatctttatcactcctgggtgtgaattaacgttttaaaatcttttgctgtctggtgtgccggatgttttgtcggatgcggcgtgaacgccttatccgaactacgtccgacaaacaaatttcgtgcgaattaccgctaaaatcgcgttttcctgcagacgcacacgtttgcgtatcatatcagaaaaaagggccggatgattccagccctgtatttttacttgctaaacgcagcctggaagacagctaccagcgcgtcgttctgactctgagtcagagtatgacctttcggatcgatgaactgtaggctgctgcggttatctaaatcgccaacctgcagtttatagtcaccggatgccaggcctggatcgctcgcgcccagttcctgccagtcgctgtcagacagcggcttataagttacggccatgttgccctggctacgggtgctgtcggtcactttcatgcccactttttccagcgccgctggcagacgttgccaaaccacattgaacggcccgcgtacgaccagcattggtaaaccggtgtcatcagctgcactttgtacgtccatagtggtggaggcacgattttgcgcagcgttcgcggcgtcagtggcagatttatccagaccggcggaaataacgttcatcatctccgtgctgtaacgctgcatggaagccgcgtctgcaaccggtttgcccgcctgttccaggttcagcagtttaaccgtaaccgcctgctgataaccctgcggcttaacagagatttgataacgaccacgatactgctcgtcttcgtccagacggttccattgtacccaatcggtggtcagtgtctgaccagcatcatcacgttgggtgatggtgtagtttttcgcctgcagcacgctaaccacctgcggccacagagtattgccacgaccattttccaccagcaaactagcggtatcgcccgtgaactgggtacgcgcgccagaaaccagtgccagcggctgggctggtggacgaatgtccagcgccttaccgacagcaccactaccgttggtcaccgggattgcataatcaccggaggtcaccggcaaaatcattccagccggggcatgaagctccgcaagcggtgccgcttccaggtaggcttcatcaccactgacctgacgcttatagcgactgtcagaactacaggcagcgagtaataaaacaaggctaacacccgcaacctttgccaggcggctcttttgaacagagtaagccatcaaatctccctaaactttacagcaaaccggcatgcttaagcgccgctctgaccgtctcacgaccactgtcggtgattggtgtcattggcaggcgcagcgtatcggtcgccacaagacccagttccttacatgcccatttcaccgggattggattgggttcgacaaatagtttgttgtgtaatggcatcagacgctgattaataacgcgtgcctcggcaaaatgcccttctgctgccagtttgcacatctgggccatatcacgcgctgcgacgttagccgtaacggaaataaccccatgaccgcccaattgcatgaagtccagcgcgctcgcatcatcgccgctcagcagaacaaaatcatcactaaccagctctttgatctggtttacacgcgttaagttccctgttgcctctttgattccgataatattttttactttcgccagacggcccaccgtttccgggagcagatcgcagccagtacgggacggcacattatacagaatttgcggcaggtcagtatgctcagcgatggctttgaaatgctgatacaaaccttcttggctcggacgattgtagtaaggggttaccgtcaggcagccgacgataccactgtcattgaagcgctgcgtcaggctaatggcttccgcagtagcgttagcgccggtcccggcaattaccggaatgcgcccatcagccagatccagcgtcatcatcaccacatcagcatgttcgtcatgatttaaggtagcggactcgccagtggtgccaacagaaacgatcgcgctagtaccgctggcgacatgataatcaatcagttttttcaagctagcccgacagacattacctttttcatccatcggagtaacaatcgcgacaatacttcccgtgaacatgggccatcctctgtgcaaacaagtgtctcaatggtacgtttggtatggcattaaaagcaagcagacagaaccgttctgattgttgtatgcatgttttttttatgctttccttaagaacaactcaccccttaaaggaataaccagtttgacactgagtagccaacattatctggtgatcactgcgttgggtgccgatcgccctggaattgtgaacaccatcacccgtcatgtcagtagttgcggctgtaatattgaagacagtcgcctggcgatgctgggagaagagttcacgtttattatgctgctttccggtagttggaatgccattactctgattgaaagtacgttaccgttgaaaggtgccgaactggatcttttaatcgtgatgaagcgcacgacggcgcgtccgcgtccgccaatgccagcatctgtctgggttcaggtcgatgtggcagactccccgcatttaattgaacgcttcacagcacttttcgacgcgcatcatatgaacattgcggagctggtgagccgcacgcaacctgctgaaaatgaacgggctgcgcagttgcatattcagataaccgcccacagccccgcatctgcggacgcagcaaatattgagcaagcgttcaaagccctatgtacagaactcaatgcacaaggcagtattaacgtcgtcaattattcccaacatgatgaacaggatggagttaagtaatgaatccactgaaagccggtgatatcgcaccgaaatttagcttgccggatcaagacggagaacaagttaatttgaccgacttccagggacagcgtgttctggtttatttctacccgaaagccatgacccccggctgtaccgtacaggcctgcggcttacgcgataacatggatgagttgaaaaaagcgggcgttgatgtgctgggtatcagcaccgataaacccgaaaaactctcccgttttgcggaaaaagagctgcttaactttacgctcctgtctgatgaggaccaccaggtgtgcgaacaattcggcgtctggggtgaaaagtccttcatgggcaaaacctacgatggcattcatcgcatcagcttcctgattgacgctgatggcaaaatcgaacatgtctttgacgatttcaaaaccagcaatcaccacgacgttgtgctgaactggctgaaagaacacgcctgattactttgctccattccgtgctggctgcgcttgcggccagcatacctcacttctcgtgatcaagatcacattctcgctttcccctgcgacacgggtgtcgaatccattttttgctgaacgttaatgaccatcatttttgtaccgttcagaatccagttaatacataacttattgaatatattgagttaatcagaatggcatcctttatgcaatatgaaatgcaatgtttcatatcattttcaaggagccgacatgaaccgctttgtggtggccgaaccactgtggtgtacaggatgtaatacctgtctcgctgcctgtagcgacgtgcataaaacgcaaggtttacagcaacacccgcgcctggccctggcgaagacgagtacaatcactgcccctgtcgtgtgtcatcactgtgaggaagccccttgcctgcaggtctgcccggtcaatgccatctctcagagggatgatgcgatccaactcaacgaaagcctctgtattggctgcaagctttgcgccgtggtctgcccatttggcgcaatcagcgctagtggaagccgtccggtgaatgcccatgcgcaatatgtttttcaggctgaaggcagtctcaaagacggcgaagaaaacgcgccaacacaacatgctttgctgcgctgggaacctggtgtccagaccgtcgcggtgaaatgcgacctgtgtgatttcttgccagaaggtccggcctgcgttcgcgcttgcccgaatcaggcgttacggctgatcaccggtgatagcctgcaacgtcagatgaaagaaaaacagcgccttgccgcaagctggtttgccaatggcggggaggatcccctttccctcactcaggagcaacgctaatggatgccctgcaattattaacctggagcctgattctctatctgtttgctagtctggctagcctgtttttactcggtctggacagactggctattaagctttccggcatcacaagcctggtgggcggcgtgattggcatcatcagcggaattacgcaattacatgctggtgtaactttagtcgcccgttttgcccccccttttgaatttgccgatttaaccctgcgaatggatagcctcagcgcatttatggtgctggttatctccttgctggtggtggtttgttctctctatagtttgacttatatgcgcgaatacgagggcaaaggcgcggcggcgatgggcttctttatgaatattttcatcgcaagcatggttgccctgctggtgatggacaacgctttttggttcatcgtgctgtttgaaatgatgagcctgtcttcctggtttctggtcattgccaggcaggataaaacgagcatcaacgctggcatgctctacttttttatcgcccacgccggaagcgtgctgataatgatcgccttcttgctgatggggcgcgaaagcggcagcctcgattttgccagtttccgcacgcttagtctttctccggggctggcgagcgcggtgttcctgctggcctttttcggttttggcgcgaaagccgggatgatgccgttgcacagctggttgccgcgcgctcaccctgccgcaccaagccacgctagcgcgttgatgtctggcgtaatggtcaaaataggtattttcggcatcctgaaagtagcgatggatctgctggcgcaaacgggtttgcctctgtggtggggcattctggtgatggcgatcggcgcaatctccgcgctcctgggcgtgctatatgcgctggcggaacaggatatcaaacggctgctggcctggagtaccgtcgaaaacgtcggcattattttgctggcagtcggtgtggcgatggtcggtctgagtctgcacgacccgctgctcaccgtggttggactgctcggcgcactgtttcatctgctcaaccatgcgctgttcaaagggctgctatttctcggcgcgggagcgattattagccgtttgcatacccacgacatggaaaaaatgggggcactagcgaaacggatgccgtggacagccgcagcatgcctgattggttgcctcgcgataagcgccattcctccgctgaatggttttatcagcgaatggtacacctggcagagcctgttcagtctaagtcgtgtggaagccgtagcgctacaacttgcgggtcctattgctatggtaatgctggcagtcactggtgggctggcagtaatgtgcttcgtaaaaatgtacggtattactttctgtggtgcgccgcgcagtacacacgctgaagaggcacaggaagtgccaaatacgatgatcgtcgccatgctactgctcgcggcactctgcgtattaattgcgcttagtgccagttggctggcaccgaagataatgcatattgcccatgcgtttaccaatacccctcccgccactgtcgccagcggaatagcacttgtacccggcacgtttcatacacaggtcacccccagtttactgttgctgttactactggcgatgcctttgctgcctggcctttactggctgtggtgtcgtagccgccgcgcagcgtttcgtcgcacaggagatgcctgggcatgcggctacggctgggaaaatgcgatggccccgagtggcaatggcgtgatgcagccgctgcgtgtggtcttttctgcgctatttcgtctacgacaacagctcgaccctacgctgaggctaaataaaggtcttgcgcacgtcaccgccagggctcagagcacagaacccttctgggatgagcgggtgatccgccccatcgtgagcgccacccaacggctggccaaagaaatacagcatctgcaaagcggcgactttcgtctctattgcctgtatgtggtcgccgcactggttgtgctgctaatcgctattgccgtctaaggaaatcaccatgagacaaactctttgcgacggatatctggtcatttttgcgttagcacaggccgtgattctgctgatgctaaccccactttttacgggtatttcccggcagatacgcgcgcgtatgcactcccgccgcgggccggggatctggcaggattatcgcgatatccacaaactgtttaaacgccaggaagttgcgccgacatctagtggtctgatgttccgcctgatgccgtgggtattaatcagcagcatgctggtgctggcgatggccttaccactgtttattaccgtttccccttttgcgggcggcggcgatctgatcacccttatctatcttcttgccctgtttcgttttttctttgctctttccgggctggataccggaagtccgtttgcgggagtcggtgccagtcgcgagttgacgctcggcattctggtcgaaccaatgcttattctcagtctgctggtattggcgctgatagcaggttccacgcatatcgagatgatcagcaatacgctggcgatgggctggaacagcccgctaaccaccgtactggcgttactggcctgtggttttgcctgcttcattgagatgggaaaaattccctttgatgttgctgaagcagaacaggaattacaggaaggcccgctgaccgaatattccggtgccgggctggcgctagcgaaatgggggctggggctgaaacaggtcgtgatggcaagtctgtttgtggccctgtttctgccctttgggcgcgcgcaagaactttctctcgcctgcctgctgactagtcttgtcgttacgctgctcaaggttttgctgatttttgtactggccagtatcgcagaaaacacgctggcacgcgggcgttttttactcattcaccatgtgacctggcttggcttcagccttgctgcgcttgcatgggtcttctggttaaccggtctgtaaggagcactgacggaatatggaaaatcttgctctgacgacgttattgctgccttttatcggcgcactggtcgttagctttagcccacaacgtcgggccgccgaatggggggttttgttcgccgcgctgaccacgctgtgcatgttgagtctgatctccgcgttttatcaggccgataaagttgccgtcacgttgacgttggtcaacgtgggggatgtggcgttgtttggcctggtcattgatcgcgtgagtacgctgattctgtttgtggtggtgtttctcggtttgctggtcacgatctactccacgggttatctgacggataaaaatcgcgaacacccgcataacggcacgaatcgttattacgcatttttactggtgtttatcggcgcgatggcgggactggtactctccagcacgctgctcggtcagttgttgttttttgaaattacaggcggctgctcctgggcgttgatcagttattaccagagcgataaagcgcagcgtagtgcactaaaagcgttacttatcactcatatcggcagcttggggttgtatcttgccgccgccacgctgtttttgcagaccggaacgtttgcgcttagcgcgatgagcgagttacacggcgacgcacgttatctggtttatggcggcatcctgtttgccgcgtgggggaaaagcgcccagctaccgatgcaagcgtggctaccggacgcaatggaagcgccaacaccgatcagcgcctatctccacgccgcaagcatggtgaaagtgggcgtttacatttttgcccgcgctattatcgacggcggcaatatcccgcatgtgattggcggcgttggcatggtcatggcactggtcaccattctttatggctttctgatgtatttgccacagcaggatatgaagcggttgctagcctggagcaccatcactcaacttggctggatgttcttcggcttgagcctctccatcttcggcagccggctggcgctggagggcagcatcgcctacatcgtcaaccacgcgttcgctaaaagcctgtttttccttgtagcaggtgcgctgagttacagctgcggcacgcgcttgttgccgcgtctgcgtggcgtattgcacaccctgccgttgccaggcgtgggtttctgcgtggcagcgctggcgattaccggcgtgccgccgttcaacggcttcttcagtaaattcccgctgtttgctgccggttttgcgttgagtgtggagtactggatcctgctgcccgccatgattcttctgatgattgaaagcgtcgccagtttcgcctggtttattcgctggtttggtcgcgttgtgcctggcaaaccgagcgaggccgtcgccgatgccgcaccgctgccaggaagtatgcgcctggtgttgattgtactgattgtgatgagcctgatttccagcgtaatcgccgcgacctggttgcagtaaggagatgatgaatgaccggttctatgatcgtaaataatctggcgggactgatgatgctgacaagcctgtttgtgattagcgtcaaaagctatcgcctgagttgcggattttacgcctgccagagtctggtgctggtgtctattttcgccactctcagctgcctgttcgccgcagagcaactgctgatctggtccgccagcgcctttatcaccaaagtgctgctggtaccgttaatcatgacttacgctgcacgaaatattccccagaacatcccggaaaaagcgttattcggtccggcaatgatggcactgctcgcggcgttaattgtcctgctttgcgcatttgtcgttcagcccgtgaagctaccgatggctaccgggctgaaaccggcgctggcggtagcgttaggtcattttctgcttggcctgctgtgcattgtcagccagcgcaatatcctgcggcaaatttttggttactgcctgatggaaaacggctcccatctggtgctggcgcttcttgcctggcgagcaccggaactggtggaaataggtatcgctaccgacgccatcttcgccgtcattgtgatggtgttactggcaagaaaaatatggcgtacccacggcacgctggacgtgaacaacttgaccgcgctgaagggataatgagatgagttattctgtgatgttcgctttactcctgctcacgccgctgctttttagcctgctctgttttgcctgccggaaacggagactttctgcgactcgcacggtgaccgtattacatagcttagggatcacactgctgctgattctggcactctgggtggtccaaactgccgctgatgcaggagaaatattcgctgcgggactgtggcttcatattgatggtctgggcggtttgttcctcgccattcttggtgtgattggctttctcaccggtatttacagcattggctacatgcgtcatgaagtggcacacggcgagcttagtcccgttacgctgtgcgattactacggtttcttccatctgtttttgttcaccatgctgctggttgttaccagcaataacctgattgtgatgtgggcggcgatcgaagccaccaccttaagcagcgcgtttctggtaggcatttacggtcagcgtagtagcctggaagctgcatggaagtacatcattatttgtactgttggtgtcgcttttggtctgttcggtaccgtgctggtatacgccaacgccgccagcgttatgccgcaggcagaaatggcgatattctggagcgaggttcttaagcaaagctccttgcttgacccaacattaatgctgttggcctttgtgtttttgctaattggctttggtaccaaaaccgggctatttcccatgcacgcctggctgccggatgctcacagtgaagcgccgagtccggtcagcgccctgctctccgccgtattgctgaactgcgcgctgttggtgctgattcgctattacatcattatttgccaagccatcggcagcgatttccccaaccggttgttgctcatcttcggcatgttgagcgttgccgtggcggcatttttcattctggtacagcgggacattaagcgtctgctggcgtactccagcgtggagaacatggggctggtcgcggtggagctaggcattggcgggccgctgggaatttttgccgcgctgctgcacatcttaaaccacagtctggcaaaaacgctgctgttctgcggttccggcaatgtactgctcaagtacggcacgcgcgatctcaacgtcgtctgtgggatgctcaaaatcatgccatttaccgccgtgctgtttggcggcggtgcgctggcgctggcagggatgccgcccttcaacatttttcttagcgaatttatgaccattaccgccggactggcacgtaatcacctgctgattatcgtcctgctgttattgctgttaacgctggtgctggcgggcctggtacggatggctgcgcgggtgttaatggcgaaaccgccgcaggccgttaaccggggtgatctcggctggttgaccaccagcccaatggtgattctgctggtcatgatgctggcgatgggaacgcatattccacaacctgtcatcaggatcctggcgggcgcttccactatagtcctcagtgggacgcacgatctgcctgcacaacgtagcacctggcatgattttttgcctagtggcaccgcatctgttagcgagaaacacagtgaacgttaatagtagcagtaatcgtggcgaagcgattctcgccgccctgaaaacgcagttccccggcgcggtgctggatgaagagcgacaaacgcctgaacaggtcaccattacggtgaaaatcaatctgctgcctgacgttgtacagtatctttattatcaacatgatggctggcttccggtcctgtttggcaacgacgagcggacacttaacggtcattacgcggtttattatgcccttagtatggaaggggccgaaaaatgctggattgtggtgaaggcgctggtcgatgccgacagtcgggagtttccgagtgtcacaccgcgcgtccctgccgcggtctggggcgagcgagaaattcgcgatatgtacgggctgattccggttggcctgccggatcagcgtcgcctggtgttgcccgatgactggccggaagatatgcatccgctgcgcaaagatgcgatggattatcgactgcgccctgaaccgacgactgattccgaaacgtatccgtttatcaatgagggcaacagcgatgcgcgggtgatccctgtcggcccgctgcatatcacctccgatgaaccgggtcacttccgcttgtttgtggatggcgagcaaattgtcgatgctgattaccgcctgttttatgtccatcgcggcatggagaaactggcagaaacgcggatgggctacaacgaagtgaccttcttaagcgaccgcgtgtgtgggatttgcggttttgcccacagtgtggcctataccaatagcgttgaaaatgcactggggattgaggtgccgcaacgagcacatactattcgcagcattctgctggaagtcgaacggctacacagtcatttgcttaaccttggcctctcctgccatttcgttggttttgataccggctttatgcaatttttccgcgtgcgggaaaagagcatgacgatggcggaattgctgatcgggagccgtaaaacctacggtctgaatctgattggtggtgttcgccgcgatattctcaaagagcaacgtctgcaaacgctgaaactggtgcgcgagatgcgcgccgacgtgagcgagctggtagagatgctgcttgctacgccgaatatggaacaacgcactcagggcattggcattctcgaccgacaaatcgcccgtgatttgcgctttgatcacccctacgccgactacggcaatattccaaaaacactgtttacctttaccggcggcgatgttttctcccgcgtgatggtccgtgtcaaagagacgtttgatagcctggcaatgctggaatttgccctcgacaacatgccggataccccactgctgaccgaaggctttagctataaacctcacgcattcgcgctgggctttgttgaagcgccacgcggtgaagacgtgcactggagcatgctcggtgataaccaaaaattgttccgctggcgctgccgtgccgccacctacgccaactggccggtgttgcgttacatgctgcgcggcaataccgtttctgacgcaccgctgattatcggtagccttgatccctgctactcctgtaccgaccgtgtgacgctggtagatgtgcgcaagcgccagagtaaaaccgtgccgtataaagagatcgaacgctacggcattgatcgtaaccgtagcccgctgaagtaaggacagaagatgctgaagttactgaaaactattatgcgcgccggaaccgcgacggtgaaatatcccttcgcgccactggaggtcagccctggctttcgcggaaaaccggacctgatgcccagccaatgtattgcctgcggtgcctgcgcctgtgcttgtccggcaaatgcgctggctatccagaccgacgaccagcaaaatagccgcacctggcagctctatctggggcgttgtatttactgcggacgttgtgaagaagtgtgcccgaccagagccatccagcttaccaataactttgaactgaccgtcaccaataaagccgatctctatacccgcgcgacgttccatctacaacgttgcagccgttgcgaacgcccgtttgccccgcaaaaaaccatcgcactggctgctgaattgttagcacagcaacaaaatgcgccacaaaaccgcgaaatgttgtgggcgcaagcgagcgtctgcccggaatgcaaacaacgcgcgacgctgatcaacgacgatacagatgtactgctggtggctaaggagcagctatgagtccagtgcttacacaacatgtcagccagcccatcacgctggacgagcaaacgcaaaagatgaagcggcatttgctacaggatatccgtcgcagcgcttacgtttatcgcgtcgattgcggcggctgcaacgcctgtgaaatcgaaatttttgctgccattacaccagtattcgacgcagaacgttttggcattaaggttgttagtagtccgcgtcacgccgatattttgttatttactggcgcagtcacccgggcgatgcgtatgcctgcacttcgggcgtatgagtctgcccccgatcataaaatttgtgtttcctacggcgcgtgcggtgtcggcggcggtattttccacgatctctacagcgtctggggcggtagcgacaccattgtccccattgatgtttggatccccggctgcccgccaacaccggccgccaccattcacggtttcgccgtggcgctcggtttgctgcaacagaagattcacgctgtggattatcgcgatcccaccggggtgactatgcaaccgttgtggccgcagatcccgccaagtcagcgtatcgccattgagcgagaagcgcggcggctggcgggctatcgtcaggggcgagaaatttgcgatcggctcctgcgccatttaagcgacgatcctacaggaaatcgggttaacacctggttgcgcgatgccgacgatccacgtctcaatagtatcgttcagcaactctttcgcgtactccgggggttacatgactgaagagtgcggggaaattgttttctggacgctgcgaaaaaagtttgtcgccagtagcgacgagatgccggaacacagctctcaggtaatgtattacagcctagctatcggccatcacgttggcgtgattgattgtctgaatgtcgccttccgctgcccactgacggaatacgaagattggcttgcactggtcgaagaggagcaagcccgacgtaagatgctgggggtgatgacttttggtgagattgttattgacgccagccacaccgccctgttgacccgggcattcgcgccactggcggatgacgcgacgtctgtgtggcaggcgcgtagcattcaattcattcatctgttggatgaaattgtgcaggaaccggccatctatctgatggccagaaaaattgcgtgagaaggatttctcattaataaggactgttgatggctatgagtgacgaggcgatgtttgccccgccacaaggaataacaattgaagcggtaaacggaatgctcgcggagcggttagcacagaaacacggcaaggcgtctttattacgcgccttcatcccgctgccgccgccgttcagcccggtacaacttattgaactgcatgttctcaaaagcaacttctattaccgctaccatgatgatggcagcgatgtgacggcaacaacagagtatcagggcgagatggtcgattatagccgtcacgccgtccttctcggcagtagtggaatggcggagctacgctttattcgcacccacggcagtcgttttacttcccaggattgcacactgtttaactggctggcgcggataatcaccccggttctgcaaagttggctcaatgatgaagaacagcaggtggcgctgcgtttgctggagaaagatcgcgatcatcatcgggtactggttgatattactaatgcagtgctgagtcatcttgatctcgacgatctgatcgctgacgtcgctcgtgagatccatcattttttcggtctggctagtgtcagtatggtactgggcgatcatcgaaagaacgagaagttcagcctgtggtgcagcgatctttctgccagtcattgtgcgtgtctgccacgctgtatgcctggcgaaagtgtattgctgacacaaacgctacaaacccgacaaccgaccttgacgcaccgtgcagatgatctgtttctctggcaacgcgacccgttattactcttacttgcatctaacggctgcgaatctgcgctccttataccgcttacctttggcaaccatacaccgggtgcattgttgctggcgcatacctcttccactctctttagtgaggaaaactgccagctactacaacacatagccgatcgcatcgctattgccgttggcaatgccgatgcctggcgtagcatgaccgatttgcaggaaagtttgcagcaagaaaaccaccagcttagcgagcagctccttagcaatctgggcatcggtgacattatctatcaaagccaggcaatggaagacctgctccagcaggtagatattgtggcgaagagcgacagtacggtgttgatttgtggtgaaaccggaactggcaaagaggtgatcgccagagcgatccatcaacttagcccgcgacgcgacaagccgctggtcaaaatcaactgcgctgccatccccgccagtcttctggaaagtgagttattcggtcatgacaaaggggcgtttactggtgcgattaatacccatcgtggtcgttttgaaattgccgatggcggcacgttgtttctcgatgaaattggcgatctgccgttagaacttcagcctaaactgctgcgcgtattgcaggagcgggagattgagcgtctcggcgggagtagaacgatcccggtgaatgtcagagtcattgccgccaccaaccgtgatttgtggcaaatggttgaagatcgccagtttcgcagcgatctcttttatcgcctgaatgtcttcccactggaattgccgccgctacgcgaccgtccggaagatatccctcttttagcaaaacatttcacgcaaaaaatggcgcgccatatgaatcgcgcaattgacgccatcccgaccgaggcactacgccagttgatgagctgggattggccgggcaacgtgcgcgagctggaaaacgtgattgagcgggcggtactgttgactcgtggtaacagtctgaatttacatctaaatgtccgacaaagccgtttactgccgacgctaaatgaagatagtgcgcttcgcagtagtatggcgcagttactgcacccgacgacgccagagaatgacgaagaagaacgtcagcgcattgttcaggtattgcgagaaaccaatggcattgttgccgggccccgtggcgcagcgacgcgattagggatgaagcgcaccacgctgctgagtcgaatgcagcggctggggatcagcgttcgcgaggtgttgtaatctgcttttgcaggagtatgcatgagaaacaaactctctttcgacttgcagttgagcgccagaaaagcggcaatcgctgaacggattgccgcccataaaattgcccgcagtaaagtgagcgtctttttaatggcgatgtccgctggcgtgtttatggcgatcggatttactttttacctttccgttatcgccgatgccccgtctagtcaggcattaacccatctggtgggcggcctttgctttacactcggctttattttgctggcggtttgcggcaccagcctgttcaccagcagcgtaatgacggtgatggcaaaaagtcggggcgtcattagttggcgaacttggctgattaacgcacttctggtggcctgcggtaatctggcaggtattgcctgtttcagtttgttaatctggttttccgggctggtgatgagtgaaaacgcgatgtggggagtcgcggttttacactgcgccgagggcaaaatgcatcatacatttactgaatctgtcagcctcggcattatgtgcaatctgatggtttgcctggcgctgtggatgagttattgcgggcgtagcttatgcgacaaaatcgtcgccatgattttgcccatcaccctgtttgtcgccagtggctttgagcactgtatcgccaatttgtttgtgattccgttcgccattgccattcgccatttcgcccctccccccttctggcagctggcgcacagtagcgcagacaattttccggcactgacggtcagccattttattaccgccaatctgctcccggtgatgctgggtaatattatcggcggtgcggtgctggtgagtatgtgttatcgggctatttatttacgtcaggaaccctgaaaaatcagcccggcgaaacagttcgtcgggctgaagattattcttgcgcgatttgcccatcgggccaggcatgaatcacggctttgatcagcgtcgccaacggaatggcgaagaatacgccccagaatccccacaaaccaccgaagatcaccacgcttaaaataatcaccagcggatgcaggttaaccgcttcggagaacaacaccggcactaacaggttgccgtccagcgcctgaataatcagatacaccgcgaagcagctccagaattcagtacctgcgccaaactggaatagcgccacgccaaccaccggaatggtcaccacaaatgcgccaatgtacggaataagaacgctgaagccgaccagcactgccagcagcaggctatagttcagcccgaagagcaagaaccccagccaggtggcgatccccaccacgatcatctccagcactttgccgcggatatagttggtgatttgttgattcatctccttccacacctgtcctgccagcccacggttacgcggcagcacccggcgaacggcgttcagcatctgctctttgtctttcagcaggaagaagaccatcaatggcaccagcaccagatagacggctatggtcagcaaaccgaccaggctggcgagggaaattttcaccacgctatcgcccatggtcagcatccgactgcgcatattttcggccattgcatcaataatgcccgcgtccattaacgccggatagcggcgcggcaacgtggcggcaaagtcagaaagcttattgagcatccccggcatatcgcggattaagtagatgccctgttgccaggcgataggcagtaccacgaacgccatcagtagcaatataccgacgaaaaccaccaatacaatgctcgtcgcccagcggcgggagcagccaatagattgcagacgcacggttggccattccagcaaataggccagcacaatagccaccagcaacggagcaagcaggccactaaagaaaaagataatgccaaatccggcaactaaaataaccagcaaggcaatcgcttccgggtcgctaaaacggcggcgataccattgcatcaacatttcgagcataaagaccttccctgaacctcaagagcgggattgcgatccgcaattgtatcgaaatgtcacaaaaaagacttcgctttttatgacggattcaggaaactgaaaagtcatttgagtgggctaatcttcgccgttacactcaaaggcggcgcggtgggaacgatatttcacagtatcggtcaaatgactatctccagaaatacaggatagaggttatgttcaggcagttgaaaaaaaacctggttgcaaccctcattgctgctatgaccattggtcaggtagccccggcgtttgccgacagcgcagacaccttgccggatatgggaacctccgcaggaagcacgctttccattggtcaggaaatgcagatgggcgactattatgtccgccagctacgcggcagcgcgccgttaattaatgacccgctgttaacgcaatatattaatagcctggggatgcgtctggttagccatgccaatagcgttaagacaccgtttcatttttttctgatcaacaacgacgaaattaacgcctttgctttctttggcggcaacgtggtgctgcactctgccctgttccgttattccgataacgaaagtcaactggctagtgttatggcgcacgaaatctcccacgtcacccaacgtcacctggcgcgagcgatggaagatcagcagcgcagcgcgccgctgacctgggtcggcgcgttaggttctattttactggcgatggccagtccgcaggcggggatggcggcgctgaccggtacactggcgggaacgcgtcaggggatgatcagtttcacccagcaaaatgaacaggaagcggaccgcattggtattcaggtgctgcaacgcagcggattcgatccgcaggcgatgccaaccttcctcgaaaaattactcgatcaggcgcgttactccagccgcccgccggaaattttattgactcacccgttgccggaaagtcgtctggcagatgcccgcaaccgtgctaatcagatgcgcccgatggtggtgcagagcagcgaagatttctatctggcgaaagcgcgcacactggggatgtataattccggacgtaaccagctcaccagtgatttgctggatgaatgggcgaaaggaaacgttcgtcagcaacgagcagcacaatatggtcgtgctttacaggcgatggaagccaataaatacgacgaggcgcgtaaaacgctgcaaccgttactggcggcagaacctggcaacgcatggtatctcgatctggctactgatatcgatcttgggcaaaacaaagccaatgaggcgatcaatcgtctgaaaaatgcccgcgatttacgcaccaatccggtgttgcagctcaacctggcgaacgcttatttgcaaggcggtcaaccacaagaagcggccaatattctgaatcgctacacctttaataataaagatgacagcaacggctgggatttgctggcacaggcggaagccgcgctaaataaccgcgatcaggagctggctgcgcgagcagaaggttatgcgctcgccggacgactcgatcaggccattagcctgttgagtagcgccagtagccaggtgaaattaggcagcctgcaacaagcgcgttacgatgcgcgcatcgaccagttgcgccagctgcaggaacgctttaagccttataccaagatgtaattcgcattaaaggaagaacaatgaccaaacaggtaaaaatctaccataacccacgctgtagtaagagccgggaaacgctgaacctgctgaaagaaaacggcgtggagccagaagtggtgctctaccttgagacacccgccgatgcggcaacgctgcgcgatttgctgaaaatactggggatgaatagcgcccgtgaattgatgcgccagaaagaggatctttataaagaactgaacctggctgacagtagccttagcgaagaggcgctgattcaggcaatggtggataatccgaagctgatggagcgcccgattgtggtcgcgaatggcaaagcgcggattggtcgtccaccggagcaggtactggaaatcgtgggttaagatgtgctccatcgctagttgaagcacattgccggatgcgacgcttgccacgtcttatccggcctacgaatactatggattaacttcgcgtagttcggataaggcgttcgcgccgcatccgacaataaacaccttatttacaacttcagaatttctttcacaaacggaatggtcagcttacgttgcgcggtaatgctcgcacgatccaactgatccaacgtcataaatagcgtgcgcatttctctgtcgagccgcttcagcaagaaacgccccacatcttccggcagttcaaaaccacgcaaacgcgcgcgtaactgtagcgcctgcaacttatcttcatcagaaagtggctgcaatttgtagatctgcccccagtcgagtcggctcgcgagatccggtaatcccagattcaactgccgcggtggacgatcgccggtgatcaacaaccgtgttttgccgctttccagaattcgattgtagagatcgaaaatcgccatctcccacaactcatcgcctgcaatacactcaatgttgtcgatacagaccaggctcaaatgctccataccgtcgagcacttccggaacaaaccaggtgcgtttatccagcgggacatagcccaccgcatcgccacgctggctcaattccgcgcaagccgcgtgcagcagatggctgcgccccgcgccttcgcgtgcccagagatagatgtaaccgctatgttcctgacgcagcacgttttgcagcgcggccagtaaagaggagttatcccccggccagaaacttgcaaaggtttcgtcgtcaggaagataaagtggcaaagagagctgtgccggtgtgttcagagatacctcaaccaggatttcacaaaatcggctgaagtttaccacagaatcccatgatgtttgaaccgggcagcaacactgcccggtcggtacattatttgtctgttatatccgcgtcttctgcgtccagcaccacttcttcagggcgcagcacactgatcagtttgaagatcaaacttaagccgataccgacgatggtcgccagcgccataccttttaactccgccgcgccgatgtttaccttcgcgccactgacgccgatgatcaaaatcacggaagtcaggatcaggttctgtgctttgttgtaatccactttgctttcgatcaaaacacgaataccggaagcaccgatgacaccataaagcagcaggctaacgccgcccatcaccggcaatgggatcatctggatagcggcagccagtttaccgacgcaggaaagcaggatagcgaaaatcgccgccccgccgataacccaggtactgtaaacacgggtgatcgccatcacgccaatgttttctccgtaagtagtatttggcgtagagccaaagaagccggaaatcacggtgctcaagccattagcaaacatgctacggtgcagacctggatcgcgcagcagatcttttttgacgatattagccgttactaccaggtgccctacgtgttcggcaataaccactaacgccgctggcagaatagtcagaatggcaaaccactcgaagcgcggcgtatagagggttggcagcgcaaaccagtgagcattaataatcggcgtggtatcgacaattcccattgcgaaagagagcgcgtaccccaccagcacgccaattaaaatcgggataattgccaggaaaccacgaaacagcacggaacctaaaaccgtgaccgccagggtggtaatagagatgatgatggttttggagtctggcgtttgcccttcagccgggagtaaacccgccataccggcagctacgcccgccagctccagaccgatgacggcaacgattgcgcccattgccgcaggtggaaacagcacgtccagccagccggtccccgctttcttcacgataaaagaaaccaggcagaacagcacgccgcacataataaagccgcccagcgcgacttcataccctaacggcaacagtaacaataccggactaataaaggcaaagctggaaccaagataagccggaattttccctttacagatgaagagatacagcagcgttccaataccgttaaataacagtacagtcgccgggttaatatgaaataagacgggcaccaggacggttgcaccaaacatggcgaacaaatgttgcaaactaagcgggattgtctgtaaaagtggcggtctttcactcaccccgatagcacggcgcgtcatagtattatcctctgtattatgtgttataggcgctttactcaaaaaaaagccgactcttaaagtcggctttaattatttttattctttatttcgtaccaaagattttgtcaccggcatcgccgaggcccggaataatgtatccgtgctcgttcagtccctgatcaatgcttgcggtatacagttcgacgtccgggtgcgctttttccagcgcagcgataccttctggcgcagctaccagcaccagaactttgatgctgctgcagcccgcttttttcagcaggtcgatggtcgcgataacggaaccaccggttgccagcattgggtcaacgatcagcgccatacgctcatcgatgttagaaaccagtttctggaagtacggtaccggctccagcgtttcttcattacggtacataccgacaacgctgatgcgcgcgctcggaacgttttccagcacaccgtccatcataccaagacccgcacgcagaattggcacaacggtaattttcttacctttgatctggtcgatttctaccgggccgttccagccttcgatagttactttttccgtttcgaggtcggcggtcgcttcgtaagtcagcaggctacccacttcggaagcgagttcgcgaaagcgcttggtgctgatatcttgctcacgcatcagtcccagcttgtgtttgacgagtgggtgtttgacttccacgatcttcatactctttctcctttgaggggcagccacaaaaaaaatcgacggattatacctcctttcttcaaggcggcaatattcttttcgttgactttagtcaaaatgataacggtttgagataaagttattttatattcagatggttatgaaagaagattattccatccgaaaactaacctttaccctggcacaagtcttctttcgccgcgcgcctggggaaaagacgtgcaaaaaggttgtgtaaagcagtctcgcaaacgtttgctttccctgttagaattgcgccgaattttatttttctaccgcaagtaacgcgtggggacccaagcagtgaccgataaaacctctcttagctacaaagatgccggtgttgatattgacgcgggtaatgctctggttggaagaatcaaaggcgtagtgaagaaaacgcgtcgtccggaagtgatgggcggtctgggcggcttcggtgcgctgtgtgcattgccgcaaaaatatcgtgaacccgtgctggtttctggcactgacggcgtaggtaccaagctgcgtctggcaatggacttaaaacgtcacgacaccattggtattgatctggtcgccatgtgcgttaatgacctggtggtgcaaggtgcagagccgctgtttttcctcgactattacgcaaccggaaaactggatgttgataccgctagtgcggtgatcagcggcattgcggaaggttgtctgcaaagtggctgtagtctggtgggtggcgaaacggcagaaatgccggggatgtatcacggtgaggattacgatgtcgcgggtttctgcgttggcgtggtagaaaaaagtgaaatcatcgacggctctaaagtcagcgacggcgatgtgctgattgcactcggttccagcggtccacacagcaacggctatagcctggtgcgcaaaattcttgaagtcagcggttgtgatccgcaaaccaccgaacttgatggtaagccattagccgatcatctgctggcaccgacccgcatttacgtgaagagtgtgctggagttgattgaaaaggtcgatgtgcatgccattgcgcacctgaccggcggcggcttctgggaaaacattccgcgcgtattgccagataatactcaggcagtgattgatgaatcttcctggcagtggccggaagtgttcaactggctgcaaacggcaggtaacgttgagcaccatgaaatgtatcgcaccttcaactgcggcgtcgggatgattattgccctgcctgctccggaagtggacaaagccctcgccctgctcaatgccaacggtgaaaacgcgtggaaaatcggtatcatcaaagcctctgattccgaacaacgcgtggttatcgaataatgaatattgtggtgcttatttccggcaacggaagtaatttacaggcaattattgacgcctgtaaaaccaacaaaattaaaggcaccgtacgggcagttttcagcaataaggccgacgcgttcggccttgaacgcgcccgccaggcgggtattgcaacgcatacgctcatcgccagcgcgtttgacagtcgtgaagcctatgaccgggagttgattcatgaaatcgacatgtacgcacccgatgtggtcgtgctggctggttttatgcgcattctcagcccggcgtttgtctcccactatgccgggcgtttgctgaacattcacccttctctgctgccgaaatatcccggattacacacccatcgtcaggcgctggaaaatggcgatgaagagcacggtacaagcgtgcatttcgtcaccgatgaactggacggtggcccggttattttacaggcgaaagtcccggtatttgctggtgatagcgaagatgacatcaccgcccgcgtgcaaacccaggaacacgccatttatccactggtgattagctggtttgccgatggtcgtctgaaaatgcacgaaaacgccgcgtggctggatggtcaacgtctgccgccgcagggctacgctgccgacgagtaatacccccgtaattaaagcgccagctctgccgctggcgtttttcaattcacctgtaaatcgcaagctccagcagtttttttcccccttttctggcatagttggacatctgccaatattgctcgccataatatccaggcagtgtcccgtgaataaaacggagtaaaagtggtaatgggtcaggaaaagctatacatcgaaaaagagctcagttggttaagcttcaatgaacgcgtgcttcaggaagcggcggacaaatctaacccgctgattgaaaggatgcgtttcctggggatctattccaataaccttgatgagttctataaagtccgcttcgctgaactgaagcgacgcatcattattagcgaagaacaaggctccaactctcattcccgccatttactgggcaaaattcagtcccgggtgctgaaagccgatcaggaattcgacggcctctacaacgagctattgctggagatggcgcgcaaccagatcttcctgattaatgaacgccagctctccgtcaatcaacaaaactggctgcgtcattattttaagcagtatctgcgtcagcacattacgccgattttaatcaatcctgacactgacttagtgcagttcctgaaagatgattacacctatctggcggtggaaattatccgtggcgataccatccgttacgcgctgctggagatcccaagtgataaagtgccgcgctttgtgaatttaccgccagaagcgccgcgtcgacgcaagccgatgattcttctggataacattctgcgttactgccttgatgatattttcaaaggcttctttgattatgacgcgctgaatgcctatagtatgaagatgacccgcgatgccgaatacgatttagtgcatgagatggaagccagcctgatggagttgatgtcttccagtctcaagcagcgtttaactgctgagccggtgcgttttgtttatcagcgcgatatgcccaatgcgctggttgaagtgttacgcgaaaaactgactatttcccgctacgactccatcgtccccggcggtcgttatcataattttaaagactttattaatttccccaatgtcggcaaagccaatctggtgaacaaaccactgccgcgtttacgccatatttggtttgataaagcccagttccgcaatggttttgatgccattcgcgaacgcgatgtgttgctctattatccttatcacacctttgagcatgtgctggaactgctgcgtcaggctagcttcgacccgagcgtactggcgattaaaattaacatttaccgcgtggcgaaagatagtcgcatcatcgacagcatgatccacgccgcacataacggtaagaaagtcaccgtggtggttgagttacaggcgcgtttcgacgaagaagccaacattcactgggcgaagcgcctgaccgaagcaggcgtgcacgttatcttctctgcgccggggctgaaaattcacgccaaactgttcctgattagtcgtaaagaaaacggtgaagtggtgcgttatgcacacatcgggaccgggaactttaacgaaaaaaccgcgcgtctttatactgactatagcttgctgaccgccgatgcgcgcatcaccaacgaagtacggcgggtatttaactttattgaaaacccataccgtccggtgacatttgattatttaatggtaagcccgcaaaactcccgccgcctattgtatgaaatggtggaccgcgagatcgccaacgcgcagcaagggctgcccagtggtatcaccctgaagctaaataaccttgtcgataaaggcctggttgatcgtctgtatgcggcctccagctccggcgtaccggttaatctgctggttcgcggaatgtgtagcctgatccccaatctggaaggcattagcgacaacattcgtgccatcagtattgttgaccgttaccttgaacatgaccgggtttatatttttgaaaatggcggcgataaaaaggtctacctttcttccgccgactggatgacgcgcaatattgattatcgtattgaagtggcgacgccgctgctcgatccgcgcctgaagcagcgggtactggacatcatcgacatattgttcagcgatacggtcaaagcacgttatatcgataaagaactcagtaatcgctacgttccccgcggcaatcgccgcaaagtacgggcgcagttggcgatttatgactacatcaaaagtctcgaacaacctgaataaccctatgccaatacacgataaatcccctcgtccgcaggagtttgctgcggtcgatcttggtagtaacagttttcacatggtcatagcccgtgtggtagatggtgccatgcagattattggccgcctgaaacagcgggtgcatctggcggacggcctggggccagataatatgttgagtgaagaggcaatgacgcgcggtttaaactgtctgagcctgtttgccgaacggctacaagggttttctcctgccagcgtctgtatagttggtacccatacgctgcgtcaggcgctgaacgccactgactttctgaaacgcgcggaaaaggtcattccctacccgattgaaattatttccggtaatgaagaagcccgtctgatttttatgggcgtggaacatacccaaccggaaaaaggtcgcaaactggttattgatattggcggcggatctacggaactggtgattggtgaaaatttcgaacctattctcgttgaaagccgccggatgggttgtgtcagctttgcccagctttattttcctggcggggtcatcaataaagagaattttcagcgcgctcgcatggcggcagcacaaaaactggaaactttaacctggcaattccgtattcagggctggaacgttgcaatgggcgcttccggtaccataaaagccgcccatgaagtgttaatggaaatgggcgagaaagacgggataattaccccggaacgtctggaaaaactggtaaaagaagttttacgtcaccgtaatttcgcaagcctgagtttaccgggtctttccgaagagcggaaaacagtcttcgttccgggactggcgattttatgcggtgtgtttgatgctttagccatccgtgaactgcgcctttctgacggggcgttacgcgaaggcgtactgtatgaaatggaaggacgtttccgtcatcaggatgtgcgtagtcgcaccgccagcagcctcgccaaccagtatcacatcgacagcgaacaggcccgacgggtgctggataccactatgcaaatgtacgaacagtggcgggaacagcaaccgaagctggcgcatccgcaactggaggcgctactgcgatgggccgccatgctgcatgaggtcgggttgaatatcaaccacagcggtttgcatcgccactccgcttatattctgcaaaacagtgacttgccgggttttaatcaggaacagcagctgatgatggcgacactggtgcgctatcaccgtaaagcgattaagctcgacgatctaccgcgctttaccttgtttaagaagaaacagttcctgccactgatacagctattgcgccttggcgtattactcaacaatcaacgtcaggcaaccaccacaccgccaacattgacgctgattactgatgacagtcactggacactgcgtttcccgcatgactggtttagtcagaatgcgctggtactgcttgatctggaaaaggagcaagaatactgggaaggcgtggctggctggcggttgaaaattgaagaagaaagtacaccagaaatcgccgcttaatactttgcgggccgacgagaaatgtcggcccgcattattcaggcactttcgcgaatgggttcgatttcattcagcgtatcaattaacggctgcggcttaccaataagataaccctgcatataatcgatccccaaagagagcaccgcctcgcggatctcttcgttttcaacgtactctgccactaccagcattttcttcattcgcgccaggtggcaaatgcttgccactatctgataatccagactattactcacaatattgcggataaaactgccgtcaattttaagcagatcggcattcacatttttaagccgcgcatagctggcgtagccggtgccgaaatcatcaatcgcaatctggcagcctaattcctgaagatgctgcaaggtgatttgcgcctgcttaacattggtcagagcattactttcggtgacttcaaaaataagttgccacgcttcaatctgatatttagccagcaactgactgacttcaacaggaaaacgagcctgacatacgctggttggagacagattaatagcaaaacggtgagcgggcatcttcgctctgttttcagccataaattgcagcgtatgctcaatgacccacatgtcgatactgctgcttaaaccaaattcgtgcgcgaccggcaagaagctatcggggctgatcagttcatcattctcacctttcatgcgcagaagaatttcatggtaaacatcaccacgcataccggtaatcggctgggccatcaggaaaaaatggttgtgttccagcgcctgctgtagtcgattcatcatcgcgactttatctttcaattcgcgttgcaaatacattgccccgcgacgctgcatattttccggggcgttggtcacgatggaaagttcggcgaccgtatttagctctcccagcagcaggtagatatgattcactgggctgcgcacatagcagtaactgacgccaatctgcggttgcatcggcatgccatcccaaaagaaacgaaattgcttgagatggctatccagtgcggtaatgcgctcctggtggctttctgtattcagtcgcagcgcgagatcgttaccgctaagctgataaacatcttcacccggttccagcaagggactcagccagtgagaaagtttttgcttgtattgaatccgcagcatgatgccatagttcttaaccagcatttccatgccagggatgcgtaaataacaaagcgcagaccagggggcatcacgcaacgcgcgattcagggcgcgaacatttggcagatgaaccaccgggtccacatacgcaagccgctgaatgcgtctgactaccgctctctgacgggttgccagtacagccatataattgacaataaaagagaataccagataactggaggaggttatggtcagctgcgtggtatagccaggataaatgggaatgtaattttgatagctgtggatgctgatcatcaacacgaccgcccagagcaggctaatcagcttataaccatagcgcatcgctccccacatcatcaggggcagcaataaactcaaggtataattggtgctaaaaattgtgcttttttcatttaacggcatgcataacagcaacaataaagcacctaatgccagtagccagagcgcgaactcttttttggtgactttggcatcaacctgctgttttaattggctataatagctacgtaaataaaatggatttcgcactacccgaatgatgaagtagcacagcgggacaccgatcagattacccaccagtaaggcctgataattgattaaagtcccgaggttaaaaggcatgacaccgaccagattttctctgctcgccagtaatcctacaaatgcagcaaactggaaaagtatcagaaacagcgttgcaggaaacacaatctgccagaatatacgctgggaaattaaacgggtatcaccatgactaacgttgttacgccggggagtaaagaccctgtaaccgccccaacagagaatgataatgataataaaattagccgttaaacttagcgtttcgtaaaaacccagctctgcatatttgcggacaaaaatccctaaggcgatccctggcaatgccgcccagctgaaaaacatcatcatgctgatcatcagtgccagaggcagataaaagagaaaaacctcaccggaagaaatatgcgcgaaagtattaatgtgggcgaaaatgggcaagattaaagaaggcaggaacagcggaagcccccaccatttatcacgtatttttatataagttgcattcagtttcatagatgctcagcagaatcccccacatcctgaaggaggtgtattcagacaggcatcccacctgacttcgaatgatgattattcatcactatagagagcattgattctaagtgtcatatgaaagtaccaattgatatatatcaaacaaaataaccctgattaatgaattattacgtttatcatgttaattcatcattattacatcatcattgtaaataattaaattaacttccataacattaaaatatgtatccactgacgcttttttacataacgaagaattgaccattttgtcctgttgtgccttaatgtaagtaccgtccacagcgtgggacatacttcaaggaaccttttgtgagtcaggcaaccagtatgcgaaaacgacaccgatttaacagtcgcatgacccgtatcgtactgctcatcagctttatcttcttctttggccgttttatctacagctccgtcggtgcctggcagcaccatcagagcaaaaaagaagctcagcaatccacactctccgtcgaaagtccggtacaacgttaacggttaccttctccactttcacagaacataacggcacttcgctgtcggatgcttttgctgtttgggattatcaaagcggcagatattctttcatcttaaattttacgtctttatcctgactgatgtttatcctgtttggctgcgaaataaatataaaattaatatatatgttgtaatgatatatttttataaattattccctgcgtgaattttaataaatttaatctatccctttatacgcaatacatttactttcctcttttgatgatcttaaatgtcttatttttcgtaatgtgtataacaaggaatagtgatgaaatttaaaaaatgtcttctgcctgtggcaatgttagcgagtttcactctggcaggatgccagagtaatgctgacgatcatgctgccgatgtttatcaaaccgatcaactgaataccaaacaagaaactaaaaccgttaatattatttccattcttcccgcaaaagttgccgtagacaactcccaaaataaacggaacgcacaagccttcggcgcgcttattggcgcagtcgctggcggtgttatcggccacaacgtcgggtctggcagcaattccggaacgacggcaggtgcagttggcggcggagctgtaggcgcggcagcgggttctatggtgaatgataaaaccttagtggaaggtgtttctttaacctataaggaaggcaccaaagtgtatacctctacccaggtgggtaaagagtgccagtttacgacaggtttagccgttgttattaccacgacgtataacgaaacgcgtattcagccaaataccaaatgtcctgaaaagagctaataatcaggaggagtcatgaagaaagtttttctttgcgccatcttagcctccttaagctatccggctatcgccagtagtttgcaggatcaactctctgctgtcgcagaagcggaacagcaaggtaaaaatgaagagcaaaggcagcatgacgaatgggtcgcggagcgcaacagggaaatccagcaagagaagcaacgtcgcgcaaatgcccaggccgccgctaacaaaagagcggcaacggcagcggcaaataagaaagctcgtcaggataaactggacgccgaagcctctgcggacaaaaaacgcgatcaaagttatgaagatgagctacgcagcttagagattcagaaacaaaaactggcgctggcgaaagaagaagcccgcgttaagcgagaaaacgaatttatcgatcaggaactgaagcacaaagctgcgcaaaccgatgtggtgcaatctgaagctgacgccaacagaaatatgactgaaggcggtcgcgatctgatgaaaagcgtgggcaaagcagaagagaacaaaagcgacagctggtttaattaatcgatgttagtaacttcaatcctataattcttgaagataaaaaaccctctgtagtaacagagggttttgttcattcatagtgcagggtcaaatcattcccactcaatggtagctggcggcttgccgctgatgtcatacaccacgcgggaaataccgttcacttcattgataatgcggttggaaacgcgaccgaggaaatcgtacggcagatgcgcccagtgtgcggtcataaagtcgatggtttcgacagcacgcagagagacaacccagtcatacttacgaccatcgcccattacgccaacggaacgtaccggcaggaacacagtgaacgcctggctgactttgtcgtacaggtccgctttacgcagttcttcaatgaagatggcgtcagcacggcgcagcaggtcacagtactctttcttcacttcacccagaacacgaacgccaaggcctggtcccgggaacgggtgacggtacagcatgtcgtacggcaggcccagctccagaccaatcttacgcacttcgtctttgaacagctctttcagcggttcaaccaggcccatcttcatctctttcggcaggccgcccacgttgtggtgagatttgatgacgtgtgctttaccggttgcagacgccgcagattcgataacgtcagggtagatggtgccctgcgccagccacttcacgtcttccagtttcagcgcttcttcatcgaatacttcaacgaaaacgcgaccgatgattttacgttttgcttccggatcgttttcgccagccagcgcactcaggaagcgatcttctgccggtacgtgaacaatgttaagaccaaagtgatcgccaaacatatccagaacctgctctgcttcgttgaggcgcagcaggccgttgtcgacgaatacgcaagtcaggtttttaccgatagcgcggtgcagcagcattgcggttacggaggaatccacaccaccagagaggccgaggatgactttatcgtcgcctacctgctcgcggatgcgagctacagcatcgtcgataattttcgctggcgtccacagggcttcacactggcagatatcacgcacaaaacgctccagcatgcgcataccctggcgggtatgagtcacttccgggtggaactgtacgccatagaagcgtttttcttcgttagccataatggcaaacgggcagctttcggtgctggctacggtgatgaagtcggacggaatagcggtaactttatcgccgtggctcatccagacatcgagcagcggtttaccgtctgcggtcagcgcatcttcgataccgcgaaccagtgcgctgtcgtttacgacttcaacctgcgcgtagccaaattcacgttcgttagaggcttcaacgtgaccgcccaactgcattgccatggtctgcatgccatagcaaacgccgaataccggtacgcctgcttcaaagacatactgcggcgcacgcggactgttttcttcagtagtactttccgggccgccggaaagaataatgccgcttggattgaagtcacgaatttgtgcttctgtcacatcccacgcccacagttcgcagtaaacacccagctcacgcacgcggcgcgcaaccagttgagtgtactgagaaccgaagtccagaatgaggatgcgatgcttatgaatgttttccgtcattgacgcttattccgaggcaagtgaaacagataatataaatcgcccgacatgaagtcgggcgaagagaatcaggagcccagacggtagttcggggactctttagtaatggtcacgtcgtgaacgtggctttcctgaatgcccgcaccgctgatacgtacaaactccgctttagtacgcagttcgtcgatagtaccacagccggtcagacccatacaggagcgcaggccgcccatctgctggtgaatgatctctttcaggcgacctttataggctacgcgaccttcgataccttccggcaccagtttgtcggcagcgttatcgctctggaaataacggtcagaggaacctttggacatcgcgcccagggaacccataccacggtaagatttgtaagaacggccctggtagagttcgatttcacccggagattcttcagtacccgccagcatggaacctaccatcaccgcgcttgcgccagcggcgatagctttggcgatgtcgccggagaagcgaataccgccatcagcgataaccggaataccggtgccttccagggcttctactgcgtcagcaacagcggtaatctgcggaacaccgacgccagtcacgatacgagttgtacagatagagccagggccaatgccgactttaaccgcactgcaaccagcttctgccagagcgcgtgcacctgcagctgttgccacgttgccgccgataatttgcagatccggatatttagcacgggtttcacggatacgttgcagtacaccttcactgtgaccgtgggaggagtcgatcagcagaacgtcaacgcctgcggcaaccagcgcgtcaacacgctcttcgttacccgcacctgcgccaaccgctgcaccaacacgcagacggccttgctcgtctttacaggcgttcggtttacgttccgctttctggaagtctttcacggtgatcatgccgatcaggtggaattcgtcatcaaccaccagcgctttttcaacgcgtttttcgtgcatttttgccagcaccacttcacgggcttcaccttcacgcacggtgaccagacgctctttcggcgtcatgtaaacgctaaccggctggttcaggtcggtaacaaaacgcacgtcacgaccggtgataatacccaccagttcgttttcttcggtaacgaccggatagcccgcaaaaccgttacgctcggtcagttctttcacttcgcgcagcgtcgtggttggcagaacagtctgcggatcagtcaccacaccagattcgtgttttttcacacggcgaacttcttctgcctggcgttcaatggacatgtttttgtggataaagccgataccgccttcctgagccagagcaatagccaggcgcgcttccgttacggtatccattgctgcggaaagcatagggatattcagacgaatagttttcgtcagctgggtgctgaggtcagcagtattcggcagaacggtagagtgagcaggaacgaggagaacgtcgtcaaacgtcagagcttctttagcgatacgtagcatgggcaatatctcgaccagagtggttaataaatattgccgcggcattatacagagcgtaaccgattgcatctacccctttttgcaaaaaatgcttgctatccccgaagggcgggttactatcgactgaataacctgctgatttagaatttgatctcgctcacatgttaccttctcaatcccctgcaatttttaccgttagtcgcctgaatcaaacggttcgtctgctgcttgagcatgagatgggacaggtttggatcagcggcgaaatttctaatttcacgcaaccagcttccggtcactggtactttacactcaaagacgacaccgcccaggtacgctgcgcgatgttccgcaacagcaaccgccgggtgaccttccgcccacagcatgggcaacaagttttagttcgcgccaatattacgctctacgagccgcgcggcgactaccagataatcgttgagagtatgcagccggccggtgaagggctgctgcaacagaagtacgaacagctcaaagcgaagttgcaggctgaaggtttgttcgatcagcaatacaaaaaaccacttccctcccctgcgcattgcgttggtgtgatcaccagtaaaaccggtgctgcgctacatgatattttgcatgtgttaaaacgtcgcgatccttctctgccggtgatcatctaccctgccgccgttcagggcgatgacgcgccggggcaaattgttcgcgccattgaactggcgaatcagcgcaatgagtgcgacgtattgatcgtcgggcgcggcggcggtagcctggaagatttatggagttttaacgacgaacgcgtagcgcgggcgatttttaccagccgcattccggttgtcagcgccgtcgggcatgagacggatgtgaccattgccgattttgttgccgatctgcgtgcgccaacgccgtctgccgccgctgaagtagtgagccgtaatcagcaagagttactgcgccaggtgcaaagcacccgtcaacggctggagatggcgatggattattatctcgccaaccgcacacgtcgctttacgcaaattcatcaccgattacagcaacagcatccgcagctccggctggcacgccagcaaaccatgcttgagcgcctgcaaaagcgaatgagctttgcgctggaaaatcaacttaagcgtaccgggcaacagcagcagcggttaacacagcggctgaatcagcaaaatccacagccgaagattcatcgcgcgcaaacgcgcattcagcaactggaatatcgtttagcagaaaccctgcgcgcacagcttagcgccacgcgtgaacgtttcggtaatgcagtaacgcacctcgaagccgtaagcccactgagtacgctggcgcgtggatacagcgttactactgctactgacggcaatgtactgaaaaaagtgaagcaagttaaagcgggtgaaatgctaaccacacgtctggaagacggctggatagaaagtgaagtaaaaaacatccagccagtaaaaaaaagccgtaaaaaggtgcattaagccagcacgaattcaacgcgttttttgcttatcaagccatgcccgtgctgacagaagtaatctactgcaccacaggcttttaacacctgcaacggttgatggcagtctggacaaagagctttcatttcaataaattccccgcaggatcggcaacgcgcatggccgttatcctgatcaagcacatgctgacattgtggacaatgcagttccatatgaattcctccggtagccattccctctacattcatagagggaatggcagataaaatacttacggataattatttatttttcttgatgtgcttcatcagacgcttacgtttacgcatctgggttggcgtcagggtgttacgcttattcgcatacgggttttccccttctttgaactgaatacgaatcgggcttcccattacgtccaggcttttgcggaagtagttcatcaagtagcgcttgtaggaatcaggcaggtctttcacctgattaccgtgaatcaccacaatcggcgggttataaccaccggcgtgggcatatttcagcttcacacgacgaccgcgtaccagcggcggttggtgatcttcaacagccatcgtcatgatgcgcgtcagcatagaggtccccacacgacgggtggagctgtcatacgcttcacgtacactttcaaacaagttaccaacaccactgccgtgcaaggcagagataaagtgcacacgagcaaaatcgataaagcccagacggaagtccagcgtttctttcacctgctctttcacttcctgactcaggccatcccacttattcaccacaatgacaagactgcgcccactattgagaataaagcccagcaggctgagatcctgatcggaaataccttcgcgcgcatcaatcactaacatcaccacgttggcgtcttcaatggcctgcaacgttttgattacggagaatttctctacagcatcggtgattttgccgcgtttacgtacgccagcggtgtcaatgagcacatactcacgtccatcgcgttccattgggatgtagatgctgtcacgcgtcgtgccaggcatgtcgtaaacaacaacgcgctcttcaccaagaatacggttagtgagtgtagacttacctacgttcggacgacccacaatcgccagtttgatcggcagactttgcgggtcgaagtcgtcttcctcttcttcttcgccgttctcttccgcttcaaattgcgcccagtattcagcgtcttcgtcgacttcctcttgcggtgcgagatcttccatccacggcagcagcacatgctccagcagacttaatacgccacgaccgtgagacgcggcgatcgggtagatttcacctaaaccaaggctgtagaaatcaaccactgcctgatcgggatccagaccgtcagttttgtttgccaccaggaaggtcggtttttcacgggagcgcagatgtttggcaatcgcttcatctgccggcatcaggcccgcgcgcgcatccaccataaacagtacgacgtccgcttcttcaatcgccagcaggctttgttccgccatgcgggtttctacaccgtcttctgtgccatcaatcccgccggtatcaatacagataaactcacggccttcaatttccgcacgaccgtacttacggtcacgagtcagacccgggaaatccgcaaccagcgcatctcgggtgcgagttagacggttaaataacgtggattttcctacgttagggcgcccgacaagcgcgaccacaggtaccatgtttaaagcctcatttttataaatcatcagacaacgcacgctatattcgcgtcgttgttaaaaacaggaaaacggcccctgtccaggagccgttttcaaagtgaacgacagagacgattaacgtgtaatagagtacacggttccgtcttttgcctggatcagcagtttgccgtcagcggcaaccggttcagtctggaaaccggaactatcaactttttgctgggcaacgaaacgaccatcttcgacgttaatccagtgcagataaccttcactgtcaccgaccaccaggttgccattatacagcaccggagaagtcagcaggcgatgcagcagatcgctttgtgtccacagcgtaacgccgccatcaatggtcaacgccatcacccggtcattttgatcgaccagatagatgcgattgccgtcgacgatgaaatcattcacgctacccagttcgcgtttccacataatctgaccactgcgcagatcaagcgccgtcaggttaccattataggccagcgcgaaaacaacgccgttaacaacgacgggagtcgtgtcaacatcgctcagacggtcaatttcggtagaaccggtcgcctgggaaatacgctgctgccaaatcatctggccctgttccatcagcactgcgctgacgcgaccattatcgccccccacgacggccgcaccaaaagccgttgtcggcgcagactcgccacgcaaagagaggctaggcatatcgaggttaactgtccatttgacagcgccgtcagcttcgttcagcgcttgtaactgaccgttactggtgtggattaacaccagaccgtcgctgaccaccgggcggctaagtgcttcacccgcgactttagtttgccatgccacagtaccatcgctggtattcagcgcgtaaacctgcgccttttcgctgccaatgtagacatgcccaccagacacggtcacaccgccagaaagtaatgcaggctctttagagaaccagccatctttctcggccaggctgacagaccagatttctttgccatcatccgcattcagcgcttttactaaaccagcgcggtccgctgcatagacaacgttgtccgccagtgccggatgaagattggaatagaagttgccaatgccgctaccaacggaagtgctccacgccgtggtcggcgtaaactggttttcaacggttggcaatggggacatctttaccacatcttcttcgctgttaaacaggctacagccgcttaaaagggtaacggaaagcagtcctggcagcagtaatttacgcaattgcatcgggtccctctcagatggacaaattattaattttcatctgcatcatttcgctcagtgccggagtaacatcgcttttcacgcctgcttcccatgcactacgcgcaccttgcttatcacctttgctcagcaatgcttcaccacgcaggtcggcaacaatggcagcccacccttcacctttgatggtatcaagggttttcagcgcggcatcagcctgcttgagctgtacctgaacgcgagcaagacgcagatttatcacggctttgagattttcatcgctcgtgtctgccagcccctgttgtaactgggcggcagctttctctagttcatttttgtcaacaaattgctgcgcaagttccaaagaagccagcgcaccataagtatttttattttcagcagcaaatttttccgccgccgggatgctatccggtttgccttcgctcactgcggtaaccgcattttgataggcaagagaagcggagcgtgcagaatcaacctgatggctgttccagtagcgccagccaatcagtgcgccaacgcccaaaatcaccccaacagccagtgctttgccattttcagcaaaaaagcgtttaaccgcttctacctggtcgttttcgttctcgtaaatttccacgctgtccttctccttccttaacccagtaacgtgcgcaaatgcgcggctacgctatcctgcgcaactgccgtttgctcaccagagcgcaaatccttcactactgctgtgccgttagccacttcagactcacccagcaccacagcaacgcgggcaccccatttatcagcacgggcaaactgtttcttaaagttgccgccgccgtggttggtcatcaatttcacgcccggtaattcatcacgcagacgctcagctaatgccatagccgcagattgtgtatcagcaccactagccaccaggtatatatcgacaacaggatcggctttaaattccggattaacggcctgtactaacaatacaagacgttcgaggcccatagcaaaaccgacagccggtgttgcacgaccgcccagttgttccacaagaccgtcataacgaccgcctgcacacacggtgccctgggagccgagactgttagtcacccactcgaaaacggtacggttgtagtaatccagaccacgcaccagacgctggtttacggtgtaagcgatccccgcgctctccagcagtttgcacagaccggcaaaatgctcacgagattcctcgtccagatagtcacctaatgccggagcgtcgttgagaagcgcctgcacttccggatttttactatccagcacgcgcagcgggttagtgtacatgcggcgtttgcagtcttcgtccagcttttctttatgctgctcaaggaatgccaccagcgcatcgcggtaattggcgcgtgcttccaggctaccgatagagttcagctcaagagttacgtgctcggaaatacccagcgcgcgccaccagcgggcagtgagcataatcagttcagcgtcgatatccggaccttgcagaccgaaaacttcgcagcccaactgatggaactgacgataacgccctttctgcggacgctcgtgacggaacatcggcccgatataccacagacgctgttcctgattgtacagaagaccatgctcgatgccggcgcgtacacagcccgccgtcccttcagggcgcagagtcaggctgtcgccattgcgatcctcaaaggtgtacatctctttttcaaccacgtcggtgacttcaccaatcgcacgtttgaatagcggggtctgctctacaatcggcaagcggatttcactgtaaccgtagctgccgagcacgtttttcagtgtgccttcaatgcgctgccagatggccgtttcgccaggcaggtaatcgttcatgccgcgaatggcttgaatgttttttgccacgtttattctctttctgaatataaaaatgaaccctcaacgcttccctcaatgtttcgggagccatgcgggttcaatcatacacgggaagcgaggcgcttcccatcacgttattatttttcaacctgctgaacgtcaattcgacgcgcttcgtccagctgactggctttcgcacgaatgcgtgcttccagctggtcgatcatatcgttgttgtccagacggtctttgcgcacgccatcttcatagaggccgcttttcttgttgccgccggtgacgccgagtgtagaaaccagcgcctcacctgggccattcaccacgcagccgataatgctaacgtccatcggagtgatgatatcttccaggcgttgctccagcgcgttaaccgtaccgataacatcaaattcctgacggctacaggtcgggcaggcgatgaagttgatccctcggctacggatacgcaggcttttcaaaatatcgaaaccgactttgatctcttcgaccggatcggccgccaggcttacgcgcagcgtgtcgccgatgccttcagacagcagcagacctaaaccaatggcggattttactgccccgctgcgcgcaccaccggcttcggtgatccccagatgcaacggctgatcgatctgttttgccagcaaacgataagactcaacagcgaggaagacgtcagacgctttcacgctgactttgaactgatcgaagttcaggcgatcgagatgatcaacatgacgcatggcagattccagcaacgcctgcggcgtcggttcgccatacttttcttgcagatctttttccaggcttccggcgttaacgccaatacggatcggaatgtttttatcgcgcgcacagtcaaccaccatgcgaatacgctcttcattaccgatattgccagggttaatacgcagacaatcgacgccgtattccgctactttcagcgcaatgcgatagtcgaagtggatgtcagccaccagcggcacgttaacctgctgtttgatgagtttgaacgcttctgccgcgtccatcgtcggtacggatacacggacgatatcagcgccaacgcgttccagcgccttgatttgattgaccgttgcttcgacgtctgtcgtacgcgtattggtcatggactgtacggcgatgggagcaccatcgccaatcggcacattcccaacgtaaatacgtgtactttttctacgttgaattggagcctggttatgcatgaaaaatctcccgcgttacccgtctgttactgcgccggactttgttcggcattgagggtcagacgcgcaacctggttagttctgataaaacgactcagatcgacaggtttcccttgatactggatctgtactgcggctggcgcaccaattttcagtttgtacggtgcctggccggttaagttcaaattaccgtctttacgctgcataccgctaaacaattttttaccggtagcatcagtgacctccagccagcaatcggcagtaaagttcatcaccagcgcattcggatcagccaccggcgtggtcacgccagcctgatcggttggcaacggcgcagcaccatctggcgttgttgctgccgttggtgccggggtcgcggcggtatcaacatttgcctggctagggctaacaaccgcattctgttgcggatcaacagctggtgctggcgcagttacggcaggtgtttgcgtgttggttgcggtagtatccacagacgctggcggcgtggacgttgtagccgggtctgtagttgtgctcgtatttaatggaacactctgcccctgctcgctattactgctcagttccgcgctagattgatcggccatagtggtgatctcttcctgctgagctttgcggtcttgccaccaccaggcaccgctcaggccgataaccacaaacaacaccagccaagtgaaggtcatcagccagccgtcgcgttttttgcggcgtttaccgagggaaaaactctgcatcggcgcaacttttgcagcccgaagtggagcctgcttttccagccctggcagcagttcttcttctggaatatgtaccagacgcgcataagagcggatatatccgcgcaggaatgtactagcaagatcggcgggtgccttatcttcttcaatgtcgcgtaccgtggaaaccttcaggcaaagtcgctcggcaacggcctgctgactaagtcctagttgttcgcgagcattacgcaggcgagcgccggtagtaagtgcttcattttggtcgtgcgtggcttcagtattcattcgctgcaggtacgtttaaatgagaattgagatgccggtgaaccatcatgctcacccacaccgcgaaacatccgttaagttaaccgttatcatacagtataagaccgtctgtgtgctcgtgacaaagcccacattcactaaggctaacttactgttgcatcgttacatactgccttaaagtcagcaaaaacgcaccgttaatattgaccagacaattgcaacttaatacttcattcataaaacattacgccacggtacataaagtaaccgtggcgtaatggctatcagaccgctttaatgtcgatggcttcaccctgcatccgtttacgcagggtacgtttcgtacggtcgataacatcgcccgccaactgaccacaggcagcatcgatatcatcaccacgagttttacgcacaatagtggtgaaaccgtagctcatcagcactttactgaaacggtcgatacggctgttgctgctgcgtccatacggcgcacccgggaacgggttccacgggatcaggttgatcttacacggcgtatctttcagcagttccgccagttggtgcgcgtgttcagtgccgtcgttaacgtggtcaagcatcacgtattcaatagtgactcggccctgattggcgttggatttctccagataacggcgcaccgcagcaaggaacgtttcgatattgtactttttgttgatcggcacaatttcgtcacgaatttcgtcgttcggcgcgtgcagggaaattgccagtgcaacgtcgatcatatcgcccagtttatccagcgccggaactacaccggaagtggaaagcgtgacgcgacgtttagacaggccaaaaccgaaatcatcaagcatgatttccatcgccggaacgacgttgttcaggttgagcagcggctcgcccatgcccatcatcactacgttagtgatcggacgctgaccggtgacttttgctgcgccgacgattttcgccgcacgccacacctggccgataatttcgctcacccgcaggttgcggttaaagccctgctgggcggtggaacagaatttacactccagcgcacaccccacctggctagagacgcagagcgtggcacggtcgtcttccgggatatacaccgtttcgacgcgctgatcgccaacggcgatcgcccatttaatggtgccgtcagaactacgctgttcttcaaccacttccggtgcgcggatttccgccacctctttcagtttgccgcgcaacactttgttgatgtcggtcatctcatcaaagttgtcgcagcaatagtgatacatccacttcatcacctgatcggcgcggaagggtttttcacctaaatctttaaaaaactcccgcatctgctgacggttgagatccagcaggttgatttttccatctttcgtggtgacgttttcaggtgtgactaattgttcagacatatgctattccggcctcgttattacacgttatggcccctggagggttgaaaaaagaaacgccccggtgagcggctgctcgtccgggggcgctgcattgtacaaattctggcgcacggatgccacgtttgcacgcggcatttacgaaattattaacgggtgcgcgggcacacttcgccttcgccaaagaaataagcgatttcgcgagcggcagattcgacggaatcagaaccgtgggtaccgttttcggtcaggctgtcagcgtaatcagcgcgcagagtaccagccagtgcgtttgccggattggtcgcgcccagcagatcgcggtgacgctgaacggcgttttcaccttccagcacggaaaccacgatcgggccagaggtcatgaattcaaccagaccatcaaagaacggttttccatcgtgttcagcataaaagccacgtgcctgttcaacggtcaggtgcagcattttggtgccaacaattttgaaccctgcagcttcaaagcgcgcaaagatattaccaatgacgttttttgctaccgcgttcggtttgatgatggaaaaagtacgttcaatagccatttttacctctgtaaattgttctgttgttgtctgtaccagcgtacgagatggcgcggattataatgagcaacagggccgttgactattgatgaaggtaacatttttttaaaataaaatgagttttagcaacaatcagggacaaaacagattattgcatgacaaatttcactgtcgcgatttgccccacgtcatccatcaccagcaattgataatcacctttatccgtcaaatgcagggtcacgttgcgcccgcgttcagttaacggttcgccattcagaaaccaccagcgttcacctgcccctccactactttgcaacggcaaagtcgcttccgctgcgcccggtaaacgtttaataatcgcgccatcgcgaacgcctgtcagctgcagcgggagctgggcatcgtgaccgtatggcgggcaacttgtgctggccggtggtaagcgcacagcgcgacgttcacttgcgggcagccagggttccagcggtagcggccagacatttatcatttcttgtcgcgcttgcgggcaatcagcggcaacacgtttgccattttcatccagccagatggggaaacgaatgccattaatgccttcctgctccggcagtaatagagttggcggctgactcccgtccagcagccaggttgccaggcggcggcgacagttaccgtcaccttccggcaaagactgtccgcccggccagcagataacgccacgagtgacactgttcgggcgcgggtcttccggcagattcgcactgcggctcagtaagatattattgacctgattcaacaatggtacggcactggcaaagccaaactgaccaacaacgggcgtgccgtccggtctgccagtccagatcccaatgacatagcgagcgttaaccccaatcgcccaggcgtcacgatagccatagctggtgcccgttttccatgccagtggggcgacgcgcggcaaggcactatccggcaagggttgcgcttcatcagccataatccggcgaatgatccacgccgccccgctgctcattaaaggccgttcaagcagcggatcgtcaggctgtaagcgcaatttgcctgccttgccgtggcgagcaaacgcggtatacgctgccgccatatcttccagttttgcaccagcgccgccgagaatgagactaagattcggcgcagcaccgttgggcaaatataacggcaatccaacattgcgtaactttgccgcaaaccgtttcggtccataggcttccagcacctgcacagcaggtaagttcaggctgcgcaccagcgcctcgctcatgctgatcgggccatgaaaaccgctatcaaagttacctggtcgataatcaccggtgcgccgggggacgtcttgcagcagacttgccgggtggatcaagccttcatccagcgccagaccataaacaaacggtttgagcacacttcctgggcttcggatgctattgaccatatcaacatgaccaaagcgactatcatcgttgagatcaacgcttcccacccagccgcgaacacgcatatcggtatgatcaaccacgatcatcgccagactgctgcgcggtggcaaccgccctttccagttttgcgccagttcttccagacgtcgttgaagaccggcatccaacgtagtagtgattttgtcgcttttgcttttaccgagcatcatgcggctaaacagcggtgccagttgcggcatttgtcggggggccagccagatgggttcttccctactctcttttacctgctcacgggaccacacaccttgcacggccatccgttcgagcactttattacgcgcggcttcggcacgctccggccaacgatccgggcgaagacggctgggcgcttgcggcaaaaccgccagcattgccgcctcggaatagcttaaattcgcagggctttttccgagataagcccaacttgccgcaccgatcccctgcaacgtaccgccaaacggagcgcggttaagatacaaggtcagaatttcacgcttagacagatgccattccagttgcaacgcgcgccagagctggcgaattttgccgccaaatgttttggggtgaggatcaagcagacgagcaacctgcatagtgagcgtgctgccaccggaaataacccgtccgctagtgagatcttgccatgctgcgcgcgccacgctgaatggattcacccccggatgcttccagaaccagcgatcttcataattgatcagcgcttcaaggtaacgtggagaaacatcttcgattgttaccggataacgccagatgccgtcagcatcggcgaagcgccagagcggcgtaccatcctgcgccacgaccactcgtgcgggattgacttcatgcagcggtagaggccagagtttatctgctccccacgctgcaagaaaaaggagaaagggcgcggctgccaacgttatccagcagccgcgtttggttaacaagcgaggcatttacggtctgacaatcagcagatcttcagccgcgccggtcgcccgccattggggaacatacatactttccaccatcggttgcggtacctgatacgttcccggcgtcaccgcccgcgccagatacaccagcgttaccggttggtattcatcaacggcaaccgccgccacaaagcgatcgtcacggaactcaatgtgcttaatgctcgcctgctgcatctggttcagtaagttctgcacttcgccaccactttgctccaggctggcgctaccgttcgccagattctggttttccagttccagacccgcaggcagcagatccacgactaacgcatccggcacgctgttactggcttttacctgcaaccacaccagcaccagatcgccgctacgtaagctgtccaggcttttgctcttaccatcagtaccaagaatatgacgctcgatttgcagcacattgttcgccggtaaaggtgcggattgcggataaccgctggcatccatacgcaaccataacggctgatcgccactgttgctcacctgcaaggtgacaagttgatcgctattcagattgctgttttgcgctttctcgcctgtcagctgctcagcactgaaagaggtttgcgcctgccatttaccgggtaaatcctgaatcgtacgggcagccaggaacaacgcgttactttcctgcgtgcttagccagcgttcaccaaacgcctgctggctaagtgtgttcagcaaagtgtactgctcatcgggtagcagtttattttcttccagcaaggagagcattaacgcgttgtcgcgcagactactaccgtaatcacccagccatatccgctcatcactattacgcggcgttttcagcgccagcgcaatcgcttcttcaccacgcgtcgcatcacccatggttttcagcgcaacgccaagttgcagcagcggtaaaccagaagcggcatctgcacgatgctcccagatttcacgcagcgcacccagcggagccttttgctgacgggccaacaccagcgcagcgtaagactgtacggcgaatttactggctttgagattatccgcgtacgggatgctcatcatgcccggatcttgtaaatagcgcagcagacgctcattaccccggttaatggcgtctgtcggcacgctgtaaccctgttcgcctgcgcggaccaggaaatccatcacgtaagccgtcagccagtactcttcgtcaccgtttttatcccacagcgcaaagccgccgttatcacgttgcatttgcagcaaacgggaaatgccgatatcgacgcttgcacggcgtttctcatcactgtcgcctttgatgcccaacgcctgcagttgggctgcgttggtataaagactcggaaacaggccgctggcggtttgctcaagacagccgtacggatacgcttttaactctttgatataacgtgcgatgttcagcggtggtttgccgctcaacaacaattgcccttccagcgtaacagggctgaagttttgcaatccatccgccggaatcgcccatgtctcaccaggctgtaacgccgtaccgtaattaaccgtttgtgccgggaacgccggacggacgccgattttccactgcttatgctgatcggcaacggtttcacccggtaacgctaacccgctaatggtggcctgaatttctccatcgccataacccggcaatgctcgcaccgggataaacagcgtagtacgcacacctggcgctaattcaacggctgcgggactatcgctgaccagttcaagcaaaccactggcggtcagggcaacgttcagtttttgcggtttatcggtaagattagtgatatccagcgtcagacggctggtatcgccactcgccataaagcgcggcatgttcagttcagcaatcaccggtgcggcaactatcactttactttcgttgctaccgaagtcatctgccgtccaggcttgcgccatgacgcgcaattcaccgttaaaatcgccaatcggcagtgtaacgctgccttcgccctgttcgttgagcgttaccggcagcgcctgctgcacgacaatattgacgtgattgaccggcggtttaccaccacgtttcagctcatcaccatcgccaccgaaacgcagagctgccagacgcccctgaccttcaataacctgaccgtaaatatcgtaaatgtctgcgccatagcgtttctgaccaaagaacgcctgccacggatctggcgtgacgtagtcagtaatattcagcacaccactatcaacggcagacaccagcacattcacctgtttaggcttctcgccatttttagtgctggctttaattttcacggttaatggttgattgggacgcatttttgctggtgtttccagcgccagatcgaggcgacggttttcatcgccaagcggcagatgcaacacaccaaccgcgcgttttggcgtcgcggagcgagatttatcgccaggacgtaccaccagcgtacttaaatacagatcatgacgattccaggttttatcgaccggaatcgtcagatccagcccttgagcccgaacatcaatctcttgccaccacagcggcccttcactggactcgaccatcgcataacctttacccgccgttggcgcggcgatatgcaacttaatggtgtcgccagggcgataactggctttatccagtttcagcgtgacacggtcgggtcgcactgcgccgctaccgtcgctgttgtcctgccagctatagccagcccagaaacgaacactactgaccgcttcattcggcgctttgacttccagacgataagcgccccactctaccggaaaactgaccttgccggtttcgtccgctttcagatccagagtttgttcattttcgatcagatctttttgatcaaactgactctgccagccttcatcttcactccagttccagtagtaatcgcggcgttcgcgaatcaggcgcacctgcaagccgctcacggcttttttcacgccttgcgcatcgctataaacgatgtcaaaagcggcgttactgccttcatcaacaatgggctgtttcaccgtgctgtcagtacgataatcgtaaacgcttttgctggcgaactgcggacggatccccggcaatgcatcggcaggccagatagcctgctcagcgcggcgcgtcaccgggcgaccgccgctttccagcaaactaccctggaaaataacctgtaatggggaatgcgtttccttccactggctttctgtagaaacttcgccgcgccctttatcatccagcgtcaactgaacttcatccagcgtgcgggaaagattttcggcagctatatcgccgaattcaaaaccaggtaaggcactcacagcttcacgcagtgggcgcaggaaaagttgcccttgcaaagtattaccattagcaggtgcaccatacaggtagtaccccaccacggagaatttcacttcatctttcggcgttagcggggttttctcaccggtcagattcagcgccatgcgctctggcataaaatcttcgacgtggaaatcccacatccgatactgattatcgcccgtgttagcgcgaatatgccacataccggttgccgcattgctatcgagtggccaggtaaagtggtagaggccattctccggctgactaacgacgctcctgagtacctgcccatcgggtttaatcacgtctaacttgatgggttgattgggcaacgctttaccgtctgcatcacgcagcaaaccattgaggattaccgtttcacctgggcgataaagatcgcgtgggccaaacatgaaaaactgtttgctatagcctggcgcgccagcaatgttaaattctgctaagtccagcgccggaagttttaaatcgagtagcgttgtctgaccgtctttacgcgccaacagtaatgccgcgtttttatcattttccagctgcacatgcccctgagcgtcactggttgcctgagtcagagtctgccctttctcatttaataaagagacttcaattccttgctgggccgcgccgttttccagactttgggtaaagatatccagacgattgtgataacggtgagcactaacgccgatatcacttaacgtaaacagcgtcgcgggattactgtaatcgtaacgtccagcctgattcatcacagccagatacacgcccgcctgctgaagcggtttgatatcgcccagcggcagcaataatttttcacgggtgttacgcgcaggattgagatcaaaccgtccggtgtagaccagatccgccatctgcagcagtttgtcactctgccagttcgccaggctattgcggtattcccattggctaatgaatgctggcagagattctggcttaacgcggaagaagttaacatcgacattattaacgttgagcgccattaccggcagcccttcaacgactttgccaggcagcaggctaccacggctggcaaaaccgacgctgggttggatgtcgcgggtagttatagttttttcgtaatctttactgaaggttgcgttgttgagtgctttgacctccttgccaatagtaacgatcaaatcacgtttcggttcgaggtggcgtaaacgtaactctttaagattatcactcagctcccaggcaccatccactttgccgctttttttatcgacgacatgaataacgcgactgaaatcctgatccgggtcgagagggatggagaacgtcagcaccagcgtggctgcaccatcaagttggacttcagagagatccagcaatgtcagcaccttaccggcactctgttgggccagtttttgtctctccggcacggagagttttgcactactcgcgttttcactagaggccgctttagtaacttcagaaggcgcatcttttttcaccgctgttggcgcgttatcgttgttgtcgcaccctgccagcgccagcattagcatgcaggcggctacgcgtaactttttcatttttcatccctgccacaatggcccgttagcaacgtcgaataattattatgcgtgagaatttacgttatgtaattcagtatcacgcccatacaatccgaattttagtgagaattgtggctcagacagccaaatcagcctcttttgcttgtcgcttttcactaaacatccgacaatttagcctaaccccggcaaaaatggagatgcctatgtccacgacatggtttgtaggagccgactggctcgccgaacatattgatgacccggaaattcagattatcgatgcccgcatggcgagccctggacaggaggatcgtaacgttgctcaggagtatctgaatggacatattcccggcgcagtgttttttgatatcgaagcgctttctgatcacacttccccgcttccgcacatgctgccgcgcccggaaacgttcgccgtggcgatgcgtgaattaggcgttaaccaggataagcacctgattgtctatgacgaaggtaatcttttcagtgccccacgagcatggtggatgctgcgcacctttggtgtagagaaagtgagcattctggggggtggacttgcaggctggcagcgcgatgatctgctgttagaagaaggtgcagtagagctgccggaaggagagtttaacgccgcgtttaatcctgaagccgtggtgaaagtaaccgatgtattattggcaagccatgaaaatacggcgcaaattattgatgcccgcccggctgcacgttttaacgcagaagttgatgaacctcgcccaggtttacgtcgcggacatattcccggagcactgaatgttccgtggacggaactggtgcgcgaaggcgaactaaaaacgaccgatgaactggatgcgatattttttggtcgcggcgtcagctacgacaaaccaattatcgtcagctgcggctctggtgtaacggcagccgtggttttgttagcactcgcgacgctggatgtgccaaacgtgaaactgtacgacggcgcatggagtgaatggggcgcgcgggcagatttaccggttgagccagtgaaataagtattttacaggcaataaaaaaccgccgaatttggcggttttttattgctagtctggttcgcggcctttccagcaggttgacttgtgttacatgagcaacgcaggtgcttcacagcaaaacaatactcaccagtaactctctttttgtcaagcaaaagagagtaattattgtttatttagcgtattatcgacaccggccctttccgccgtgttcggtaataaaataacctggcttattagtccgaattcagacaaatataaataaatcctgctcaaaattaaaaattctaaccggtaaaagatattacttaaacatgtaaattcactttcctttaaaaaacaaaaaaccgccaaaatcaggcggttttttgttgctggtccggttcgcggcctttccagcaggttgtattaccgtagtaatgcaagcgcgtctcagcggagacaatactcgccagtaactctctttttgtcaagcaaaagagagttattattgttctgttagtgtattatccactgcggccctttccgccgtctcgcaaacgggcgctggctttaggaaaggatgttccgtggccgtaaatgcaggtgtttcacagcgcttgctatcgcggcaatatcgccagtggtgctgtcgtgatgcggtcttcgcatggaccgcacaatgaagatacggtgcttttgtatcgtacttattgtttctggtgcgctgttaaccgaggtaaataataaccggagtctctccggcgacaatttactggtggttaacaaccttcagagcagcaagtaagcccgaatgccgccctttgggcggcatattttagattatccgattctgtttaaagtcacgcaaaaaaccaccccagcgacgttcatagaatggcgcaatatgttcggtaataaagtggctaattcctttttccccttttttcacctgacaaatatcgattggttcatcgccaggtaatgtatcggtcgctacacttcccgtcgcctgaataatttcttcgatatcaccatcggcttcaatgccaataagtaaattaggctgtgcctcttcgttctctttaatactacaaataaaagcacgcttcaccggcttaatggttttaaataaggtggtgagactatcaatcatttgtgctggcggctctgcgacttcgcttaatatcaggctttcaccgccttccaggatttcctggctgctcagcggatttccctcttcaccaatcaacaaactgatttcacgcggcataaattctttaccggttggcagtttggcattaaggaagagcgtttcgccaagtgtcatctcaaacagcgtgcgaacgggcattacgacaaatgcctgttcgtcttcaaccgcctgttgaagtgcttctaagctggtgaaaaaaggaatgacgctggtgccgtcttctttttcccagtgctgtaaatcaagcgcgctatcttcaaccacagcctcgccctgcgccgccgtaccaggcacccagacggtggattccagtagagtacggaaaaaggccgggcggtgcgccggttcagttgctgctttttccagcaggtcttcaagttcgttttttgtttcggacataagaaccacaattcattcaacgttcggggcgcaaatgcctgatgcgctacgcttatcaggcctacaagggattcgcaatttgttgaatttgcagaatttgtaggccggataaggcgtttacgccgcatccggcatattagtttacgccgttaacagattagctatcgtgcgcacaccaagtcccgtagcgcccgcagaccactgttcaaccggcgctttacggtaagtcgcgctgcagtcgatatgcagccagccttgctgatagttctcaacaaagtggctcaggaagcccgccgccgtgctcgcgcctgccggatacgccgcgcttccggtattgttcagttcggcaaagttagacggcagctggctgcggtggaactccgccagcggcagacgccagaacggttcgttctcctgcgcggcactcgccagcaagcgaccggccagcgcatcgtcaaaactgaacagcgcgtgataatcattacccagcgcagttttcgccgccccggtgagggtcgccgcatcaatgatcatttccggtttctgcgcactggcatcaatcagaccatcggcaagcaccagacgcccttcggcatcagtgttcatcacttcaacttttttaccgttgcgataggtgatgatatcgcccagcttgaacgcattgccgctaatcaggttatccgcacagcagaggaacagcttcacgcgcttgttcagtccgcgcgtaatggcaaatgccagcgccccggtaaccgttgccgcgccgcccatgtcgctcttcatgctgtccataaacgcagtctgtttgatgctgtagccgccggagtcaaaagtgatacctttacctaccaggcacgcgtacactggcgcttctttatcgccagttgggttgtaatccagcgccagcaataccggagaacgttcactaccgcgtccgactgtgtgcagccccatataaccttgctcacgcagatcttcgcctttggtgatccgataagtcacacgatcgcccgcgacgttgctgatcagatcaacagcacgctgtgccagttggcttggtcccaattcttctgccggtgcgttgatggtgtcacgcacccagtcgatgatcatcaggcggttatccagttcctggcgctgggcatcgtccagatccggccacaccactttacgcgtgcctttcggggctttgtaaccttgccagaatgcccagcagcgatccgcatcccagccttcaccgcttaactgaacatgcttgatgcccagaccgtcaatcttgcgcgccgcacgctggatcagccccagatcgtctgccccgttcaaatgcagggtaatgccgtcattattaatgctgtaagttgctttttctccccagcgcgcgtcggcaggttgggtagagagggtaatcttcatcgcttctgtcattttagttatccttctttgtaaaagggccgccagttggcagccccaggatttttccgctaaatgattcgcgttgcaggaaggcggcaagtgagtgaagccccaggagcatagataactatgtgactggggtgaacgagcgcagccaacgcatctgcggcgtgaagcatgacgcggaaattattcggcctcgtccagccagactaacaaaatcgcttcgaggattttctcgttggatgcctgcgggtcgtcgtcgaaatcttccagatcgcaaatccactgatgcatatcggtgaatcgaaccgttttcggatcaagatcgggatacgcatcgtacagtgcttcgccaatttcgcggctatcggtccacttaagtcccatactaacctctgttaatgctcacgcgcatggttgatagtgtaacgcgggatttcgactactaaatcttcgtcggtaacgcgcgcctggcagcttaaacggctttccggctccagtccccaggctttgtccagcatgtcgtcttcctgctcactgctttccggcagactgtcaaaaccttcacgaacgatgcagtggcaggtggtgcaagcacaggatttttcacaggcgtgttcaatctcgataccgttacgcagagctgcgtcgagaatggtttcaccgctattagcttccagaacagcgccatcagggcagagatcctgatgaggcaaaataacaatctttggcatattaaacctcgtccacggaatggcctttcagcgcacgacgaacgctctggtccatgcggcgagcggcgaaatcctgggtttgtttgtctacgtttttaatcgcttgttcgatggcgtcaacatcatcgccctgcgccacttcactcaggtgagcggcagcatcgtcaatgacctgacgttctgcggcgcttaacagcgcggcatcagcagccagcgcgccgtgcagactttccagcacacgcgccgcttctactttttgttctgccagcattcgggcttttacgtcctgctcggcatagctcatactgtctttgatcatgctagcgatttcgctatcggtcagaccgtaagacggtttgacctgaatagacgcctcaacgccggtggatttctccatcgccgtcacgctcaaaagaccgtcggcatcgacctggaacgtcacgcgaatatgcgcaccgccagccggtagcgccggaataccacgcagcgcaaaacgcgccagactgcggcagtcctgcaccagttcgcgctcaccctgcattacatggatagacatcgccgtctgaccatctttaaaggtggtgaaatcctgagcgcgggccaccggaatagtggtattacgcggaatcactttctccaccaggccgcccatcgtttcgaggcccaggctcagtgggatcacatcaagcaacagcatttcgctgtctggcttgttacccaccagaatatccgcctgaatcgccgcgccaatagcgacgactttatccgggtcgatggaagtcagcggtggacgaccgaaaaattcgcctacccgttcacgcaccagcggcacgcgagtagaaccgcccaccatcaccacttccagcacttcatcagcttctacacccgcgtctttcagcgcgcgacgacaagccagtaaggttcgttttaccagtggcgcgatcagttcattgaattgttcacggctgatttcgccctgccagcccgcaacgttaacggtcacggagtccgcatcgctcagcgcgattttggctgcaatggcggcatccagcagttcacgctgaacgcggttatcgctacgatcaggaatgcccgcctgctcgcgaatgtaatccgccagcagatggtcgaaatcatcgccgccgagcgcggaatcaccgccggttgccagcacttcaaacacgccgcgacttaagcgcagaatggaaatatcaaacgtcccgccaccgaggtcataaacggcgatcacgccttcctgaccggaatccagcccgtaggcgatagccgcagcggtcggttcgttaagtaagcgcaggacgtgaaggcccgccagacgcgccgcgtctttggtgccctgacgctgggcatcgtcaaagtacgccggaacggtgataactacaccatccagctcgcctgccagggcttcagttgcccgcgccgccagtgctttgaggatgtccgcagaaacgcgcaccgggttcagcagccccgccgccgtttcaatcatcggcaggccgttttcgctggcctggaattgataaggcagatgcggatagcgttgctggatatcagccaggctgcgtcccatcaggcgtttaacagaactaattgtgttggcggtatcgagcgctgcattagtacgcgcgtcataacccacgctatgcccttgctgttgatagtgaacaacagatggcagcaggtgacggccttcatgatcggctaacgtttcggcctgaccgctgcgcactgtcgccaccaggctgttggttgtgcccaggtcaataccggccgccagacgacgctgatgcggcgcagcactcaaaccaggttcactaatttgtaataaggccatgtttagcttccagaaattaaaaatcgagcagtttttcttcgagttgttcggcactgcttcgcagtttatcgagaaaacgcagcttacgcacggtatccgccgccgcgtcccacgtctcgttgtctaactgttcaaccatcaactgatggcgggtatcaaacatctttttcacacgtttgataaagctttccagccgcgcttcatctttcgcctgttcgatctcgtccagctcttcgcgcagctccaactgttccatcaggaacgcggtgtcgcgcacagtatgctgctcgctggcgagatcaaagccgtgcaaagaaagcaaatattccgcgcgcattaacggatgacgcagcgtttgccaggcctggttaatggttgcagattgctgtacggcggcgagttgttccgcctggcttccgctggcgaatttatcaggatgatactgacgttgtagatcctgaaaacgcaggctcagcgcctgggtatcgagttgatagcgggcaggcaagccaaagagggtgaagtaatccataacattctcagggctgcgatccgccgcgataacggcgaatcaggtaaaacaaaccccacgcgcaggcgaccacggtggggttatcggtatgcgcatcaaacgtggaagctttcgccgcaaccacactcatctttgacgttcgggttggtgaatttaaacccttcgttcaggccttcttttacgaagtccagctgcgtaccgtccagaaattgcaggctcttgccatcgaccacgactttcacgcctttgtcttcaaacacgatgtcttccggcgtcggttcgtcaacaaattccagtacataagccataccactacacccggaggttctcacgcccagacgcaggccaaaccctttaccgcggttagccagaaaggtatttactcgcgctgctgcactgtcgctcagtgtaatgctcataaccaaacctcaactcttattttgcttcacgtttgcttttatagtccgcaatggcggctttgatcgcgtcttctgccagaatagaacagtgaattttcaccggcggcagttcaagttcttcagcaatatcggtgtttttgatcgcctgcgcttcgtcgagagacttccctttcacccattcggtgaccagggagctggaagcgatagcggaaccgcagccgtaagttttaaaacgcgcgtcttcaatgataccttcatcgttgactttaatctgcaacttcatcacgtcgccacaggccggtgcccccaccatgccgctgccgacgttctcgtcgttgttgtcaaaggaacccacgttacgcggattctcgtaatggtcgataactttttcgctgtaagccattataaattctcctgattccgataccgattaatgatgagcccattcgatgctgttcagatccacgccctgcttgtacatttcccacagcggagaaaggtcacgcagacgaccgatggatttacgaactaactcgatggtgtagtcgatctcttcttcagtagtaaaacgacctaaagagaaacggatagagctatgtgccagctcgtcgttcagccccagcgcgcgcagcacgtaggacggttcgaggcttgcactcgtacaggcggaaccactagaaactgcgaggtctttcagcgccataatcaggctctcaccttcaacgtagttgaagctgacgttgagaatgttcggcgcaccgtgttccaggtcaccgttcaggtaaacttcttcgatatctttgatgccgttccacagacggttacgcaggccgcgcagacgttccatctcggtcgccatctcttcttttgcgatgcgataggcctcgcccattccgacgatctggtgaacaggcagagtgccggaacgcataccgcgctcgtgaccgccgccgtgcatttgcgcttcgatgcgtacgcgcggtttacgacgtacatacagcgcaccgatacctttcgggccatagattttgtgaccggagaaagacatcaggtcaactttcaactggctcaggtcgataggcagtttacccacgctctgggttgcatcaacgtgatagataatgccacgagcacggcacatttcgccgatagccgcgatatcctgcaccacgccgatttcgttatttacgtgcatgatggacacgaggatggtgtcgtcacgcatcgctgcttcaagttctttcaggtcgataatgccgttacgctgcggtgccaggtaggtgacttcaaaaccttcgcgctccagctgacggcaggtatccagtaccgctttgtgttcggttttgctggtgatgatgtgcttgccttttttctgataaaagttggctgcacctttgatcgccaggttgtcagattcggttgcaccagaggtaaagacgatttcacgcggatcagcgccgaccagatcggcaatctgattacgggcgatatctaccgcttcttcagcctgccagccgaaacggtgagaacgggaggccgggttaccaaaggttccgtccatcgtcataaactgcatcattttctcggcaacacgcgggtccaccggcgtggttgcggagtagtcgagataaatcggtaatttcattgctctataaactccgtacatcactcaatgcaaggaatcaggctaccggctggatgtacgaccgtgtttacggagtatttagcactccggcctgattctgaattctttttattaagcgcgtaacttaacgtcgatcgcgtcttgtgtgcgggtgcgtggcgcgtcgtgagtatgctgacgaccagacacatccagcacttcctggttattaaccagttcgcctaaagtaatgttgttgagaaaaccggtgagacggtcgctcaaatcacgccacagcgcgtgggtcaggcatttatcgccgccctggcagccgcctttaccctgacaacgggtggcatctacagattcgtcaacggcgctaattacttcgccaacggcgatgctgctggcatctttgcctaacagataaccaccgcctggtccacgtacgctggaaaccagaccatttttacgcagacgggaaaacagttgttccagataagaaagggaaattccctgacgttcggaaatatcagccaacggtaccgggcccgcttcagagttgagcgcaacgtcaagcattgcggtcacggcatagcgccctttagatgtcagtctcatgtcttacttcacctcaaactcgcccctgcccggggttttttattgtaaaagtgggggtattgcatagcagggtcaagtctgacattcccgagtaaattggtcaactatttacttgactgatttagtcgggtatttaaccttcagtgccatttttttatcgtggcgtttgtacctgttgtcggatgcggcgtgaacgccatatccgccctggggttctgtacactgtaggcctgataagacgcattacgcgtcgcatcaggcaacggctgtcggatgcggcgtgaacgccttatccgacctacggttctgttcactgtaggcctgataagacgcattacgcgtcgcatcaggcaacggctgtcggatgcggcgtgaacgccttatccgacctacggttctgttcactgtaggcctgataagacgcattacgcgtcgcatcaggcaacggctgttattcggccttgttacctttattctgctgctcaatagaagccagaatcccgcgcaggatattcaactcctggctttccgggcgcgcacgggtaaacagacggcgcaatttattcatcacctgccccggatggttttcacggataaaaccggttgccagcagcgtttgttccagatgaccataaaaacgctccagatcatcgaccagcggatacggcgtctcttcatgctcgacctgctcgccgttttcctgagttgccagccaggccatgcgcacttcataggcaataacctgaaccgccatcgccaggttcaggctgctgtattccgggttagccgcaatcgcgacatgataatggcatttctgcaactcttcattggtcaagccgacgcgctcgcgaccaaacaccagcgccaccggggtatttgccgcttcagcgacgcttttcaggccgcattcgcgcgggtcgagcatcggccatggcagcgtgcgggaacgtgcgctggtgcccaccaccaggctacaaccggctaacgcttcgtcgagcgtatcgacgatgtgagcattaccaatcacatcgctggcccctgctgccagggcaatcgcctgggagtcgggtttcaccagtggattaaccagccacagattggttaatcccattgttttcatggcacgggcaacagaacccatattgccggtgtgactcgtctccaccagcacaattcgaatattttgcagcattgtctttcttcatctaaagattattcacgcatcttatcataaaacgaagacagatgccgatctcgctgctatactctgcgccgttttcccgttctttaacatccagtgagagagaccgatgcatccgatgctgaacatcgccgtgcgcgcagcgcgcaaggcgggtaatttaattgccaaaaactatgaaaccccggacgctgtagaagcgagccagaaaggcagtaacgatttcgtgaccaacgtagataaagctgccgaagcggtgattatcgacacgattcgtaaatcttacccacagcacaccatcatcaccgaagaaagcggtgaacttgaaggtactgatcaggatgttcaatgggttatcgatccactggatggcactaccaactttatcaaacgtctgccgcacttcgcggtatctatcgctgttcgtatcaaaggccgcaccgaagttgctgtggtatacgatcctatgcgtaacgaactgttcaccgccactcgcggtcagggcgcacagctgaacggctaccgactgcgcggcagcaccgctcgcgatctcgacggtactattctggcgaccggcttcccgttcaaagcaaaacagtacgccactacctacatcaacatcgtcggcaaactgttcaacgaatgtgcagacttccgtcgtaccggttctgcggcgctggatctggcttacgtcgctgcgggtcgtgttgacggtttctttgaaatcggtctgcgcccgtgggacttcgccgcaggcgagctgctggttcgtgaagcgggcggcatcgtcagcgacttcaccggtggtcataactacatgctgaccggtaacatcgttgctggtaacccgcgcgttgttaaagccatgctggcgaacatgcgtgacgagttaagcgacgctctgaagcgttaatgactcaggcgggtgatatcactcacccgccctcgcctttcaggcgctattccgaaatacttcctcactgctttactttctttcgtcactctcccaccatctttccccgattaatggatgataaagaagagccaaggaaaggttatggcactgccagtgaacaaacgcgttcccaaaattctgtttattctctttgttgttgccttctgcgtttatttagtgccgcgcgttgccatcaacttcttctattatcccgacgataaaatttacggtcccgatccctggagcgcggaatccgtcgaatttacggctaaggacggtactcgtctgcaaggctggtttatcccttctagcacgggccctgctgacaacgccatcgcaaccatcattcatgctcacggcaatgccggaaatatgtccgcccactggccgctggtcagttggttacccgagcgtaatttcaacgtttttatgtttgattatcgcgggtttggtaaaagtaaaggcacgccgtcccaggccggattgctggacgatacgcaaagtgccatcaatgtggtgcgccatcgcagtgatgtaaacccacaacgtctggtgctgttcgggcagagtattggcggggcgaatattctggatgttattggtcggggtgatcgtgaaggcatacgtgcggtgatcctcgactccacatttgcctcttatgcaaccatcgccaaccaaatgatccccggcagtggctacttacttgatgagagttacagcggcgaaaattatatcgccagcgtcagcccgatcccgcttttactcattcacggtaaagctgatcacgttatcccatggcagcacagcgaaaagttgtatagcctggcaaaagagccaaaacggttgatcctaatcccggatggcgaacacattgatgctttttccgatcgtcacggcgatgtttatcgcgaacagatggtggactttatccttagcgcgttgaatccgcagaactaacccatgatcgctagcacgataatcattcacaaaaccaccttaagacatgctaatccactggtcagaacagtttaagatgagaaaaattctgtgacgcttgccaacatttctgatgattagcattcccttcgccatttccttgagcaaactttagctattcttatcaattatgcttatgggagatctacagatgatgcctacgcttgctccaccatctgtccttagcgctccccagcgccgctgccagatcttgctgacgctctttcagccggggttgaccgccaccatggcaaccttcagcgagcttaatggtgtggatgatgatattgccagtcttgatatcagcgaaacaggacgggagatcctgcgctatcatcaactcacactgacgactggttatgacggtagctaccgggttgaaggtacagtgcttaaccaacgtttgtgtttatttcactggctacgacgtggtttccgtctgtgtccgagttttattaccagccaattcacccccgccctgaagagtgaactgaagcggcgcggaattgcgcgtaacttttacgacgataccaatctacaagcgttagtgaatctctgctcccgacggctgcaaaaacgctttgaaagccgcgatattcatttcctgtgtctgtatctgcaatattgtttgctgcagcaccacgctggaattacgcctcagtttaatccgctccaacgtcgctgggcggaatcctgccttgaatttcaggtagcgcaggaaattggacgccactggcagcgtcgggcgctccagcctgtaccacctgatgagccactgtttatggcactacttttttccatgttgcgggttcccgatccattgcgggatgcgcatcagcgggacagacaattgcgtcagtctatcaaacgtctggtaaaccattttcgtgagctgggaaatgttcgtttttatgatgaacaggggttatgtgatcagctttatacccacctcgcccaggcgttaaatcgcagtttgtttgccatcggtattgataataccctgccggaagagttcgccagactgtacccacgcctggtgcgcaccacccgcgcggcgctggccggatttgaaagtgaatacggcgtccatctttctgatgaggaaagtggtctggtcgcggtgattttcggtgcctggctaatgcaggaaaacgatctgcatgaaaaacagattattcttcttaccgggaatgatagcgagcgagaagcgcagattgagcagcagttacgcgaactaacgttactgccgctcaacattaagcatatgagcgtaaaggcatttttgcagacaggcgctccgcgtggcgcggcactgattattgcgccttataccatgccattaccgctctttagtccaccgctgatctatacggacctgacgctgacaacacatcaacaggagcagatccgcaaaatgctcgaaagtgcatgatcagcaactgggaacaactttcgggcgcaaaaacattgccggaagcgccaccagcgccattacccagaacacgccgtggcccagatattgatacaggaaaccggcgaaaacggtcatgatagcgatactgccgcccatcgcgacggcagagtaaaccgcctgtaaacggatgacttcgctaccctggcgagcagcaatataacgcatggcggccaggtggcagaccgtgaaggtgccgcaatgcagaatttgcaccactatcaaccacggcaacgccgtagttgctcccataatgccccagcgcactacgccgcaaatcgcgctgatcaacagcatatcgcgtgcactacaacggcggaaaagtttattactcagcgcaaagataatgacttccgccaccacgcccaggctccacaaataccccaccgcgctggcgctgtagccagctgcctgccagtaaatggcgctaaaaccgtaataggccgcatgtgccccctgcaataaacaaacgcaggccagaaagcgccagttctggcgaaccagcgccaaccacgcagaccaaccggtgctctcctgctggcgacttgccccttgtggctgaatcgtcggacggatgagaaagccgagcagcatggatgccacgcccaacgtcaacagcgcgaggatcacccgataatcaaacatagtgaccagtttgcccgtcagcgcgctgccaatgacaaacgccacgctgccccacagtcgcactttgccgtaatcaagcgggaactgcttttgccacgtattcgccagtgcatcggtcaacggtaccagtggactgaaaaagaggttaaagccaatcatcaccagcatcagccacgctacgtgcgcccccgcccagaaggcgacagcaaagagaagtgtcagcagtgccagcacgcgcaaggcggaaatcaggcgggaaggatcgctgacgcggggcgcgatgagcaaactcccgaggaaacgggcaaccagacctgcccccaataacaggccgatggtttctggcgttaaaccaatccctttaagccagacgctccagaaaggtagaaaaatgccgtaactaaaaaagtatgtgaaatagccgagcgccaaccagcgcgtggattgcaaaaccatgagtccctcccgtcaggaggcgttagtctggggttaatcgaatgttggtgcaagttgaaaaataagaatattcgagcctgcttcccgatgtctgtaacgccagttcacaagcactaaaaaactgagatccgcgacgcatgttgcaaaaataatgcgtaattatgccgttacgcttgccaaacgttcctgcacaatggcgatgaaatcgcgtaatgccggcttcatctcccctttcttccacgccatcagtaaagcaatggaaggcacatttccggcaatgggacgaaaaacaacctgtccggtattaaaattattcatataaccgggtatcaaagtgacgcccagccccatgcccaccagattcatggtcaccagaatattcgttgccacctggacgatatttggctggctgttttcttgcgcaaaccacgctttaacgatcggcgcaaggctaccggaatacaccggatcggtactgacgaaattcacgccatccagttgcgcggcggtgatctctttttcatgtgctaaagggtgatcaaccggtaacacaaccactaatggttcgtcaaaaagctccagataatcaatctccgggctataaacaggatggcgcattaagccgacgtcgagttcaccacggcgaattttttcctcctgttgcgtggtgattaaactcaccagctcaatcaaggtgtctggctgtctgagacgaaacatcggtaatacttttggcagtaaattcacttccgcgcttggcacaaagccaatggttaattgtctgtcttcctgaacaattttccgcgcccgtaatttggcattttccgcttgttcgaggattgccagcgcgtcctggagaaaacattctcccgccgccgtcaacgcgactttgcgcttatccctcaccagtaacggaacaccgacacagttttcaagatcgcggatctggctgcttaagctaggctgactggtatgcagtttttccgccgcacgggtaaagttcagtgcctgcgccactgcgacgaaatagcgtaaatgccgtagttccatcaccttccccttgttatcgaaaaaacgtctcagctggtagaaattaactatttcacatattagcaaccaaccagcaacatccttatggcacaaaaatagaaggtcaatacatcttatctttcaggattaaaaaatatgaccacacccagtgatttgaacatttaccaactgattgacacccaaaatggtcgggtcactccgcgtatttataccgacccggatatttaccaactggagcttgagcgtattttcggtcgttgctggctatttctcgcccacgaaagccagatcccaaaacccggtgatttctttaacacctacatgggagaagatgcggttgtcgtagtgcgtcagaaagacggcagcatcaaggcgtttctcaaccaatgccgccaccgggccatgcgtgtgagttatgcagattgcggcaacactcgcgcctttacctgcccgtatcacggctggtcttatggcattaacggcgagttgatcgatgtaccgctggaacctcgcgcctacccacaagggttgtgtaaatcccactggggactaaacgaagttccttgtgtggagagttataaagggctaatttttggcaactgggataccagcgcaccgggcctgcgtgattacctgggtgacattgcctggtatctggatggcatgctggatcgtcgcgaaggcggcaccgaaattgtcggcggcgtacaaaagtgggtgatcaactgtaactggaaattcccggcagagcagttcgccagtgaccagtatcatgctctgttcagccatgcttctgccgttcaggtattaggggcgaaagatgatggcagcgataagcgcctcggtgatggacaaaccgcccgcccggtgtgggaaaccgccaaagatgcgctgcaatttggtcaggacggtcacggtagcggtttcttctttactgaaaaaccggatgctaatgtctgggtcgatggcgcagttagtagctattaccgcgaaacctatgccgaagcagaacaacgtttaggtgaagttcgcgccctgcgcctggcgggtcataacaatattttccccacgcttagttggctaaacggcactgccacactccgcgtctggcatccgcgcggccctgatcaagttgaagtgtgggcgttctgtattactgacaaagccgcctccgatgaagttaaagccgcttttgaaaacagcgccactcgtgcttttggtcctgctggttttctcgagcaggatgacagcgagaactggtgtgaaatccagaaattgcttaaaggccaccgcgcccgcaacagcaaactgtgtctggaaatggggcttggtcaggaaaagcgccgcgacgacggcattcctggcattactaactatatctttagtgaaactgccgctcgtggaatgtaccaacgctgggccgatcttctgagtagcgaaagctggcaggaagtgctcgataaaaccgccgcttaccagcaggaggtgatgaaatgagtgcgcaagttagtctagagttacatcaccgcattagccagtttctctttcacgaagccagcttactggacgactggaaatttcgtgactggctggcgcagctcgacgaagagattcgttacaccatgcgcaccacagttaacgcgcaaacacgcgaccgccgcaaaggcgtccagccaccgacaacctggatttttaatgacaccaaagaccagctggagcggcgaatcgcccgtctggaaacgggcatggcctgggcagaagagccgccgagtcgcacccgtcacttaatcagcaactgccagataagcgaaaccgacatcccaaacgtatttgctgtgcgggtaaattatctgctttatcgggcacaaaaagagcgcgatgaaacattctatgttggaacgcgtttcgacaaagttcgccgtctggaagatgacaactggcgcttgctggaacgggatatcgtcctggatcaagcggtaatcacttcccataacctgagtgtactgttctgatgaatcgaatttatgcgtgtcccgttgcggatgtgccggagggtgaggctctccggatcgataccagccccgtcatcgccctgttcaacgttggcggcgagttttatgccattaacgatcgttgcagccatggtaatgcgagtatgagtgaagggtatctggaagatgacgccacggtggagtgcccgctacacgccgccagtttttgcctgaaaacggggaaagcgttatgcctgcccgccaccgatccgctcaccacttatccagtacacgttgaaggtggtgacattttcatcgacttaccggaggcgcagccatgagcgatctgcataacgagtccatttttattaccggcggcggaagcggattagggctggcgctggtcgagcgatttatcgaagaaggcgcgcaggttgccacgctggaactgagcgcggcaaaagtcgccagtctgcgtcagcgatttggcgaacatattctggcggtggaaggtaacgtgacctgttatgccgattatcaacgcgcggtcgatcagatcctgactcgttccggcaagctggattgttttatcggcaatgcaggcatctgggatcacaatgccagtctggttaatactcccgcagagacgctcgaaaccggcttccacgagctgtttaacgtcaatgttctcggttacctgctgggcgcaaaagcctgcgctccggcgttaatcgccagtgaaggcagcatgattttcacactgagtaatgccgcctggtatcctggcggcggtggcccgctgtacaccgccagtaaacatgccgcaaccggacttattcgccaactggcttatgaactggcaccgaaagtgcgggtgaatggcgtcggcccgtgtggtatggccagcgacctgcgcggcccacaggcgctcgggcaaagtgaaaccagcataatgcagtctctgacgccggagaaaattgccgccattttaccgctgcaatttttcccgcaaccggcggattttacggggccgtatgtgatgttgacaagccggcgcaataatcgcgcattaagcggtgtgatgatcaacgctgatgcgggtttagcgattcgcggcattcgccacgtagcggctgggctggatctttaaggaagcacgatgaaagaaaaaacgatcattattgtcggtggcgggcaagcggcggcaatggctgcggccagcctacgccagcaagggttcaccggtgagctgcatctgttttccgatgagcgacatcttccttatgaacgacctccactcagcaaatccatgttgctggaagattccccgcagttacagcaggtgttacccgctaactggtggcaggaaaacaatgttcatctgcattccggtgtaaccatcaaaacgctgggtcgcgacacacgagagttagtgttaaccaacggcgaaagctggcactgggatcagctttttatagcaaccggcgcggcagctcgaccgctgccgttgcttgatgcactgggagaacgctgctttaccctacgccatgccggtgatgccgccagactgcgagaagttctgcagcccgaacggagtgtcgtgattatcggtgccggaactattggtctggaactggctgccagcgccacgcagcgcagatgtaaggtgacagtgattgaactggcggcaaccgtcatgggccgtaatgcaccaccgcccgtgcaacgctatcttttacagcgccaccagcaggctggtgtgcgcattctgctcaataatgccattgaacatgtggtcgatggtgaaaaagtagaactgacgctgcaaagtggggaaacgcttcaggctgatgtggtgatttacggtattggtatcagcgccaacgagcaactggctcgcgaggccaaccttgatactgccaatggcattgtcattgatgaggcttgccgcacctgcgatcccgcgatctttgccggtggcgatgtggcaatcactcgtcttgataatggtgcactacaccgctgcgaaagctgggaaaacgccaataaccaggcgcaaattgccgctgccgcaatgttagggctaccgctaccgctactgccgccgccgtggttctggagcgatcagtacagtgataacttacagtttattggcgatatgcgtggcgatgactggctttgtcgtggcaacccggaaactcagaaggcgatttggtttaatctgcaaaacggcgtgcttatcggtgcggtcacgctgaatcaggggcgtgagattcgcccaattcgcaaatggatccagagcggcaaaacgtttgatgcgaaactgctgatagatgagaacatcgcgcttaaaagtctgtaaccaggataattagcgaatatctcaatgcctggggcgtggcgaggtgcaagagtgtgtattacgtttaaaagtcattatcttgcaaagggattggttatgaacacactacgttattttgattttggagctgcccgccccgttttgttattaattgcccgtatcgccgtggtcttaattttcattatttttggttttcccaaaatgatgggctttgacggtacggtccaatatatggccagcttgggcgcgccaatgccgatgctggcagcgattattgcggtagttatggaagtgcccgccgcgatattaatcgtgcttggctttttcacccgtccgctggcggtgctgtttattttctacacgctgggtacggcggtgattggtcaccattactgggatatgaccggcgatgcggttgggccaaatatgattaatttctggaagaatgtcagtatcgctggcgcgttcttgctattggcaattaccgggccgggggcaatttctctcgatcggcgttaagaaagatgccggatgcggcgtgaacgccttatccggcatttaataaattacagccactctacccgcaagctcatctcactagttgtactttcccctggtgctagcgcaatgagatcacccccttccgggcgatgatgatcatccggcgcatggctcatcggttccagacagaagaaatcaaacgcatatcctttatcaaacgcagggtcggaaacaaagatgaaataacacggtgcaggtggcgtcgtttccatgatgatggcataaccttcctgcggctgctcgatgcgggcctgaccattccatccggcaaaaccattgttcacccactggcgcggcaacggcgcgggctggttaaaatccagttcctgcggtagctgctcgcaaaactcacccgccagccactgctcccgctccagccagtaaccgctcgcctgtgcctgaatccgcgtttgcgggctcaacggaaaataaggatgccagccggtaccaaatggcagcgtctctgccccttgattggtgacagagagcgtcaccgtcagcgtatccgccgttaaatgaaacgcctgacttacccgatagtgatagacaccgctgcgatgttcatacaccagacacaaactatcatcgctgtggctgacacattgccactcgcccagccagccatcgccgtgtagatagtgcgcatcccactcaacattcggttgcagttgatactcacgcccctgccagacaaaacgattgccgctcacccggtttgcaaatggcaccagcggaaaacaactggcatcggttgccacaccgctttttttaccaggacgtaagagcggcgtcgtatcgcgccagaagccttcgattacgccgccctggtcagaaacgtccagctttaggctcccgtgggataaggtatagatggtcatccgctaactccttaatccgggaagttaatcacaactttcccgcatttgccgctcgccatcagcgcataggcatcacctgcctgttccaggctgaagcgatgggtaatggcgttacgcggccacagcttccagtccgtcagatcatgggcgcatttttccatatggaacagactggtcacccaggagccgataatccgccgttgatggtgcatcagatcggcgctgacctcgaattccacttttccggtttcaccaatgtaaaccacccgtccccagtcagcggtggattgcagtgccagcaagcgacctgcggcattaccggaacaatcgagcgcaacatccgcgccaccgtgggtgagttcggcgataatctgcggcagaccttcggtggttgctaaatagccgtgatccatcacccctaactgttttgccatcgccagacgttccggcagcatatcaacgccgatgatccgttttgcaccgcgacctttcgccagcatcatcgccatcatgccgactggccccagaccgaccaccagcacgttatcactgccggaaacttcgccgcgcaaaattccttcatacgctgtaccaacgccgcaactgataaacgcaccatcttcgtagctcagcgcatccggcaggaggatcagatctttttcttccgccagcaagtattcggcatgaccgccgtcacgctgccagccgtaagccgcttttccttcgccagtacaagaaataggaaaaccgcgacggcagttcgggcaaaaaccacagccagaaatgtgatacaccagcacgcggtcgccctctttaaaatggcggcagccttgccccatcgccacaatctgcccgcacggttcatgaccgttgataaagccctggtataacggtttatcgggtgccgccgctgtggcacggtgttgatgatagatatagtggacatcgcttccgcaaatcccggaggatttcattttgatcagtacctggttaatccccggcgtcggcaccgcaacttcccgcagatcgacggtgctatttcctggtaaataagctgccagcatcgttttcataaatccctcattaacaatacgattaattttcatccctgccgcacccgcgccaggggcgttaaggtttagcgtttcgctttactgcttcgctgggtcagcaagatattcgccagcaccgccaccacgatgatgacgccgcgtaccacctgctggaaaaaggagttaataccgagcagcaccagaccgttaccgattagcgtaatcaccagcacaccaagcaatgtaccgaacagggaaccgcgaccgccggaaagtgccgtaccgccgaccacgaccgcggcgatgacgtcaaactccagaccgtttgcggcacctgcgttaccagaaccgaggcgcgccgccaacaaaatgccggtcaccgccgctaataatccgctaagggtaaagataagaatgcgcacccgacgaacgttgatgccgcacaactgcgccgccgtagcattaccgccaacggcaaaaacgctgcgcccgaaggcggttttgcggctgatgaacacaaacagcgcaaacaacacaatcatgatcagcgcggataccggcacaccgagaaattgtccgcccagccagtccagcacctcgttttcatcaatcggcactggcagtgcgttcgtcataaacagccccattccgcgcagggcgctccacagccccagtgtggcaacgaaacttggtacattaaacacgccgcgcagcaccccggccagcgttcccatcagcgcgcctaacagcaacaccagcaggcacgccaccgccagcggaacttcaaattgcagcaaaaatgccaggcacacgctgacaaaagccaccatcggcccaacgctgacatcaatttcaccggagataataatcagcgtcatcgcccaggcggcaatcccaatggtggcggcatcgcgcagcacgttcatctggttattcaaactgataaagccaggcgcgttcagggagaagaccagataaagaatggcaatcaccaccagcaaaccgatctcattaatatggcgactgacaaattgtttgaggctgacgctcttgccctgcggcaatggtaaactgctagcagacatcttcaggttcctcggtaaaattcatcagtgcacagacagaatggcggacatcagctcatccacattgaccggagcgtgaaactcctggctgaacgtgccgtgctgtaataacaggatgcggtcacacaccagcggcaactcctccacttcactggagataaacaccacgctttttccttcggcagccagctcacggacaatacggtaaatctgctgtttggcttcgatatcgacgccgcgcgttggctcgtcgagcaacaaaatctggctggcagcatagacccaacgaccgatcaccactttttgctgattgccaccagaaagcgtgccgatgggtgtttcgctactggcggccttgaccgtcatccgctgcatcacctcttcggtcaggcggcggatggtggaccattgcagcacaccgttggcgctgattttttgccgattggtcagcactgtattttcgtcaacgcccaaccagggaatgatccccgcttctttgcggttttctggcgtatagccaatgccgcgtttcagcatgtcgccgtaatcggggcgcgtgattttctcgccgttgataacaatttcgccctgttcatactcctccagcccaacaatcgccttcagcaattcactgcgccctgcccccagcagaccagcaatgccgagcacttcgccacgacgtagcgtaaaactgatatcctccagcttgggcttatggcgtaacgcacggacttccagcacggcctgatccacaatttcctgaggggctaccggcgcaatatcaacgtgatcgcgcccgagcatcaggctcacaatatgatgcgtggaggtgttttcgagcatcacatcgcccgccacctgaccatcgcgcataacggtggcacaggaggcaatgcggcgaatttcttccatccggtggctgacataaatcaccgccacgcccagtgcgctcatctttttcaccgcgctgatcaccagttcaacttccgcactcgcaaggctactggtaggttcatcaagaatgaccacgcgcggctcgcccttcatcacccgcgcaatttccaccagctgcttttgcgccgggcttagcgtactaacaagttgttcaggactaacgtcaacgcccagcgcctgtaagcaacgttgggcatcctgcgccatttgcaggtaatcaatcatgccgttgcggcggggccactgaccgaggcagaggttttccgccactgtcagcccttccaccagacttaactcctgataaaccgcgcgcacccccagttcagcggcacggcgagtcagcgtagcttcgtcaccttccagtcgcgtctcgccaatccagatatcaccgctatccgggcgttcgctgccggtaagcattcgaatgagagtgcttttgcccgcgccgtttttacctaacagcgcacgaacttcgcctttattgagcgtgaagttaacgttatccagcgcaacgacgccgggataacgcttatttcctgccaccacttttgctaccgggactgcctctgttgccgtgaacatagggacctctgcgaatcagcgattagggcagaccatcaacgtgcgttgccagccactgtttaccgtcttccgttttggtatagagatcgataggcacctgaatcactttttcaccgtcggcttgtttattgataaccttcaatgtttgcgcgaaaacagcattgcccattttcttaccggaaatatccactaccgctttcagcacctgattgttttccagctcctgagcaatttcggttgtcatatcgctaccgaaaacagcaatttttccggcctgattttgattacgtaccgcttttaccgcgccgagtgtcgcaccgccgctttcccccataatggcgttgagatccggcgtggagataattagtttttcaccaacggaaatcgctttatctaaaacagtcccttcctgattagcgacaatttgcgcgccgggaacgcgggattttaaaacttcttcaaatcctttacgtcgctgcacacaaacttcaaaggcttcgcaattgatgacggcaattttcggctggtcaattttattggcaataaaataatcagcggcagcgttacccagttttttaccaaattccagcggatcgccgaccagatacgcgctgacatatttatcgacccccttttgattaatacaggtgttgtagcaaatcaccggaatgcccgcttcactggcgcgacgaacggtacggctactgccattttcagacactgcgcttaaaataatggcatcgacattacgcgccacgagggtatcaacaaaggtactttctttgctaatatcaccctgggcgttagtttctattaactgaacttgtacactggaatcttttgccgcatcctgaacgccctgacgcactccagcgtagtatccctgagtatcaaggtatattgcgccaatggtcatttctttttccgcagccctggcaaatagtgcgctacctaatagcgtagccattaataatagattacgggttgttctcatttttgtaggcatagagcctcctgtagggtttttattaacaacggcttattctaattattttgtgatgagcggcagcgcgtgccgctcaaatattacagttaatagggtttagtgaacgcggttaaaaataaaaggcatcacggtggtgaataatgccgctttcggccaagccggattaatcgccgtcaattcagcgcgagcagactcatattgcgcaacctccccgagtcccgcggacgccagcatcgccaccatcaggcatttttctttatgctgctgttgtaaatcgccatacaggctcaacaagtcaggttggctgacggcaaagaaatccgcttcgatactggttttcgccatctcttgcgcccactgtttcatttcactaaacagttgctgtgcggtttgttgttcgcccagcagtcgcagcgccatcccttgccagaagagataatcaaccggctgatcgttgtaataactgtgaatgttaatagtgcgatcgccggtcgccgccagacgtaaacaacgcgtcgcttcagtttcatcgccctgcgcgttggcgcatatcgcctgccagaaccagatgtcgttatcagtttgccccggtaaacggccttcgcttaaattctccggataatgcagcgcggcatgaagcagttcgcaggcctgctgcggctgtctggcatcaagatgctgccaggcgcgtaataactggttgaggataaactgactggtgaccttcccttccccgccttcccacgggtggaatttgcgcgtggcgagaatgtccgccgctttgtctgcctgacccgtgagatgccacaaattgagcagttctgcggtcatgtcgtcgcgtttcagcgcaatttccagattattttccagacgcgccagtcgtttctccggtgtggctccacttaacttatccagcaaatcccgttcgaaaagcagacgtgcatcctgcggcgcaagctgataagcattatcaagataacgcgcggccagctcataatcgtgttgcttattccacgcatggatcgctaacccgcgccagccgtcggcaaactccgggctcatctctacgcaacgttgccaaaaggcaatggctttgttgtagctacgtttgttgtagtagaagcaagctagtaaatggcgagcaaaccagcactcttcaatactctccagcgccgccacttcttccagcgtattcgggaaacggacaaactgcgggaagacatcaatggcttttgcgaccagttcgccacgttcggctttcggcagcaagctggcttgcaggtaaagcggcagcgtgcgctggcagtccagtgcgttcagcatctctgccgccagggtgggcattccccagttaatcagttgcccggcggtcatcagggcgttaacgtcgcgtccctgacacagaccgcgccactgcgcgagagcactttcgctacgaccatcgaaccagttcagccaccacagagtggcgttcagcggataatcgcgcagcagtttctcgcgctgcacacgcgcgttgtcctgacgaccacttaacaccagcagcagattatgcaggcaaagcacttcctgattggttgggcaggcgcgaagactttgttggcaaaaatccagaccagcgtcgaagttaccattacgcgccgccagtcgtgccaggccataatagccaccggctttgctgttgccgctccagaccgcacgccagaaatcctcttcggcttgttgatattgtccctgacgttcgtaagcactggcgcgaatcaaactcgcctgtccgcactgcggatttttgttcagcgcatgtgcgcgtttcagagcctgagtggcatacgccaccgcttgcgggaaatctgcgcggttatattccagcatcgccagcgccaggttacagcgataatccagcgggtccagcgccacgccgcgcaggtagtaatcgaacggactacggctggcgtgatgatattgctccagatgctgaccgataaaccaggcttcatctgtactggtaatgtcttgtgctgccagtggcgctttggcgacgtccggtaacggcaacgcttgcggctgatgttcctgataactcagtacaatattgccgtcggcatcggagagctcaatggtcagcctttcaggattgataccgtgcaacacgccctggatggcggtcgcaggcatcagtgccacggcatcatcaagtaacgcgttgcatttaccgatttcgcggatcgccaggcggtatccgttcaacggagagatggcatacagcccccactcaatcccccgcttactacgctggagttttatcaccgcatcgcgggaggcattttgcaccatgcccaaagaatgataaggcaggaaatactgctcaaaacgcttctcttcgtaagcatcaagccaggtaaaatcgggctggttatcggcaaaaataccggtcatcagttcgatatacgggccgttattgtcggtcagactcttatcccacgcctggccaaattcactgtgtccccaactccactgttttttacctggcgcaatatggtggttggcaacgtgcagcaaaccgccatcttcatcgtgacaccacgcgccgacaaaatcgtactggcttttttcggccatataactggttggaacaggcacatttttatagcgagaaatgtccactccagcggagtagtccactttgtagtaagtgccggtagcgatggggaaagcggagacggcccgtttgccgtgatcaaacaccgccgttacatccggcgggaagacgctctgatgcccttccccccctttcactgccgggttggcccaccacaagaaatgacgcggcgtggcgttcccgttatagacgcggctggcgatttccagcgccgcccggtcagggcgcagggtgaaacctgtcatcacctgtaaaccatgcatcggctccgtttcgcctacccacaccgtctgtgcaccgtcttcatgggcttcgagggtgaaatcaacgggcataaaggtggtcgggcgatgatgttgcggccagttaaactcaatcccaccggaaatccacggccccagcagccccaccagcgcaggtttaatgacttcattgtgataaacaaaatcgcgctgtttcactttatcccacgcgcgatgcacccgaccgcccagttccggcaggatcatcactttgatgtagtcgttttccagccacaccgcctgccaggatttcagggttttctgctcgctcagcgtatcggtcacgccgtagggataaaccgcgccggagcttccctgataaacgcgattttccaggaacatgggatgtatatcctgcggcccggtttcataggtcgggatctcaacgcgctcttgccacacttttactggagtcatggtgccctcaatattaacaagacatactgaattaaaagatttgtggcagtgtattgaacaatctggcaatgttttcgcggaataatcacgcaattaactaaacaaggtttagtgaagatgagagcctgcattaataatcaacagattcgccaccataacaaatgcgtgattctggaactgctgtaccggcaaaagcgcgccaataaaagtacgctggcccggctggcgcaaattagcattccggcagtcagtaatattttgcaggaactggaaagcgaaaaacgggtggtgaatattgacgatgaaagccagacgcgcgggcatagtagcggtacatggctgattgcgccggaaggtgactggacgctgtgcctgaacgtgacgcccaccagtattgagtgtcaggttgctaatgcttgtttaagtccgaaaggtgaatttgagtatttacagattgatgcaccgacgccgcaggcgctgctgtccgaaatcgaaaaatgctggcatcgccaccgtaaattgtggccggaccataccatcaacctggcgttggcaatccacggtcaggttgatcctgtgaccggcgtgagccaaaccatgccgcaagcgccgtggacaacgccggtggaggtgaaatatctgctggaagagaagctcggcattcgggtgatggtcgataatgactgcgtgatgctggcgctggcggagaaatggcaaaataatagccaggaacgggatttctgcgtgatcaacgttgattacggcattggcagcagcttcgtgattaacgagcaaatttatcgcggcagtttgtatggtagcggacagattggtcacaccatcgttaatccggatggcgtcgtctgcgactgtggacgttatggctgcctggaaactgtcgccagcttaagcgcattaaaaaaacaggcgcgggtatggctaaaaagtcaaccggttagtactcaacttgatcctgaaaaactgactacagcgcagttaatcgctgcctggcaaagtggagaaccgtggatcaccagctgggttgatcgctctgccaatgccattggtttgagtctgtataacttcctcaacatcctcaatattaatcagatttggttgtacggtcgcagttgtgcctttggtgagaactggcttaatactattattcgccagacaggatttaacccgttcgaccgcgacgaaggaccgagcgtgaaagcgacgcaaattggctttgggcaattaagccgcgcacaacaggtgctgggaattggctatttgtatgttgaggcgcagttacgacagatttgatggcgcgataacgtagaaaggcttcccgaaggaagccttgatgatcataaacgaaaaattgcctgatgcgctacgcttatcaggcctacacggagattgcaatatattgaatttgcaaagttttgtaggccggataaggcgttcacgccgcatccggcatgaacaacgagcacattgacagcaaatcaccgtttcgcttatgcgtaaaccgggtaacgtgcgcagatgtcgagaactttacctttgatgcgctcgataacggcttcatcattgatgctgtccagcacgtcacacatccagccagccagttctttcgcttcggcttctttaaagccgcgacgggtaatcgccggagtacctacacgaataccggaggtcacaaacgggctcttcggatcgttcggtacgctgtttttgttgacggtgatgttagcacggcccagagcggcgtctgcttctttaccggtcaggtttttatcaaccagatcaaccaggaacaggtggttatcagtgccgccggaaaccactttgtagccgcgctcgaggaacacttctaccatcgctttagcgtttttagcgacctgctgctggtaagttttgaactcaggctccatcgcttctttcagagcaaccgctttaccggcgattacgtgcatcaacggaccgccctgaccaccagggaaaacggcagagttcagttttttgtacagctcttcgctaccacctttcgccaggatcaggccgccgcgcggacccgccagggttttgtgagtggtggtagtaacaacgtgagcatgaggaaccgggttcgggtagacgccagcagcaaccaggcccgcaacgtgcgccatatcaacgaacaggtaagcaccgatgctgtcagcgatttcacgcattttcgcccagtccaccacgccggaatatgcagagaaaccaccgataatcattttcggcttgtgttctttggcttgtttttccagatcggcgtagtcgatatgaccggtagcatcgataccgtaaggaacgatgttgtacagtttaccggagaagttaaccggagaaccgtgagtcaggtgaccgccatgcgccaggttcatacccagaacggtatcacctggttccagcagcgcggtgtagaccgcaaagttagcctgggagccggagtgcggctggacgttagcgtagtcagcgccgaacagttctttcgcacgatcgatcgccagttgttcaacgatatcaacatactcgcaaccgccgtagtagcgtttgcccggataaccttcagcatatttgttggtcagctgagaaccctgcgcctgcattacgcgcgggctggtgtagttttcggaggcgatcagttcgatgtgctcttcctgacgtactttttcctgctccatagcctgccacagttcggcatcataatcggcaatgttcatttcacgctttaacatccgcatctcctgactcagctaacaataaaatttttggcctttataggcggtcctgttggacaacggcgaacagtataaccgaatcattgtgcgataacaggtcttgacaaaggaatttacgcaaacgattaccttcaggctacgcaaggctttggagaataaagagcttgcaaccggaaacggatttcttttcaggtttgtgatgcaaatttttcacttcatcacattctttctgaaaaacaccaaagaaccatttacattgcagggctattttttataagatgcatttgagatacatcaattaagatgcaaaaaaaggaagaccatatgcttgacgctcaaaccatcgctacagtaaaagccaccatccctttactggtggaaacggggccaaagttaaccgcccatttctacgaccgtatgtttactcataacccagaactcaaagaaatttttaacatgagtaaccagcgtaatggcgatcaacgtgaagccctgtttaacgctattgccgcctacgccagtaatattgaaaacctgcctgcgctgctgccagcggtagaaaaaatcgcgcagaagcacaccagcttccagatcaaaccggaacagtacaacatcgtcggtgaacacctgttggcaacgctggacgaaatgttcagcccggggcaggaagtgctggacgcgtggggtaaagcctatggtgtactggctaatgtatttatcaatcgcgaggcggaaatctataacgaaaacgccagcaaagccggtggttgggaaggtactcgcgatttccgcattgtggctaaaacaccgcgcagcgcgcttatcaccagcttcgaactggagccggtcgacggtggcgcagtggcagaataccgtccggggcaatatctcggcgtctggctgaagccggaaggtttcccacatcaggaaattcgtcagtactctttgactcgcaaaccggatggcaaaggctatcgtattgcggtgaaacgcgaagagggtgggcaggtatccaactggttgcacaatcacgccaatgttggcgatgtcgtgaaactggtcgctccggcaggtgatttctttatggctgtcgcagatgacacaccagtgacgttaatctctgccggtgttggtcaaacgccaatgctggcaatgctcgacacgctggcaaaagcaggccacacagcacaagtgaactggttccatgcggcagaaaatggcgatgttcacgcctttgccgatgaagttaaggaactggggcagagtctgccgcgctttaccgcgcacacctggtatcgtcagccgagcgaagccgatcgcgctaaaggtcagtttgatagcgaaggtctgatggatttgagcaaactggaaggtgcgttcagcgatccgacaatgcagttctatctctgcggcccggttggcttcatgcagtttaccgcgaaacagttagtggatctgggcgtgaagcaggaaaacattcattacgaatgctttggcccgcataaggtgctgtaatttgatgttgccggatggaaacatccggcaacccttgacgcggtttaaattgccgcgtcgtcctcttcaccggtacggatgcgaatgacccgtgccacgtcaaagacgaagattttaccgtcaccgattttgccggtttgcgccgtgcgaataatggtatcgacacaggtatcgacaatgtcgtccggtacgacaatctcaattttcactttcggcagaaaatccaccatatactccgcgccgcggtacagctcggtatggcctttctggcgaccaaagcctttcacttcggtcaccgtcatgccggtaataccgacttcggccagtgcttcgcggacatcgtccagcttgaagggttttataatcgcatcaatctttttcatgctattccttgaaaaggtcgcctgtcttttgatctgctaaacgtaacacataacgccaattcattccttgaaatcgtttgcatccagctcgtgtcgggaaagcagtttataaaattctgtccggttgcgccccgccattctcgccgcgtgggtgacgttgcctttggtgatttgcagcagcttacgcaaatagttgagttcaaactgattacgtgcctcaacaaaggttggcagcgccgtattttcaccctccagcgcctgctccaccagcgcatcactaatcaccggagaactggtcagcgccacgcactgttcaatcacgttgaccaactggcgcacattacccggccagctcgcggtcatcaggcgtttcatcgcatcggtagagaacgcgcggacaaacggtttatgtcgctctgccgcctggcgcaacaggtgatttgccagtagcggaatgtcttctgtgcgctccgccagtgccggaattttcaggctgacaacgttgaggcggtaatagagatcttcgcggaattccccgcgcgccatcgcttttggcagatcacggtgagtggcagaaataatccgcacattgatatcaatatcgcggttactgcccagcgggcgcactttacgctcctgcaacacgcgcagcagtttgacctgtaacggcgcaggcatatcgccaatttcatcgagaaatagcgttccgccttccgccgcctggaataaaccttcgcgattgctgacagcgccagtaaacgcgccacgcgcatgaccaaacagctcgctctccagcaattgctcgggcaatgcgccacagttaatagcaataaatggtttgctgttgcgcgggctggcgttgtggatagcctgggcgaaaatctctttcccggtgccgctctgaccgttaatcaaaacgctgacgtcactttgcgccaccagccgcgcctgttccagcaaacgcagcatcagcgggctgcgggtgacaattgcctcgcgccagcgttcatcggtggctggcgcggattgctccagcgcatcgtcaattgcctgatatagcgcgtctttgtcgacaggcttggtgaggaaactaaaaacgccctgctgtgttgcagcaacggcatcgggaatagaaccatgcgcggtaagaataattaccggcattcccggctgcactttctggatttcagcaaacagctgcataccgtccatttcatccatccgcaggtcgctgatgactaaatctactttttcgcgattcagtacccgtaatccttcagcgccactttccgccgtgaccacactgtagccttcgctggtcaggcgcaggccaagcagtttcagcaatcccggatcgtcatcgaccaataataaatgcgcaggtttatggctcatcaggagtgacctcatgggtggatggcgcgggcttttcactctcgtgcggcgtatccgggctgaaatttccagccggtttgcgggtgctgagctggcgttcaatatcggtcaggttttccagcttgcgggtggtgagttccagttgctgctgtagaacgtgatgttgctggcgcaatgtatccagctcgctgtcgctggactgctggagtttactgtaacgttggcgctcttccgccagttgcagttgcagcgcctgaccatcgcgccagagttgatacagtgggcgaacctgtgccgggatctcggtacttaacgcttcaatacgcgcgaccagctggcggcgctcatacggcgtaattttggcgtcggcgagcaaaatcccttgtttaaaggtattttgccagctgccgtcgtcatattggcgagcttgctgacggctctgcgcaggcattaaacgatcagcacaatccatcgcccgcagccagtaaagcggattggtttcggtacttttaccttgcagcgcccagatgtcgctacattcagtagaaagatagtcagccagttgataaaccggaattttttcttctgctggcgtatcaatggctggcttattgtgattctgcacgcaacccagcaatgccagacatggcagccctgccagccacagccgtcggggcaataatcgttgaaaaatgtgtcgcatattcaccagacttaaagcctatcccagtgggcgtaattgttgcagacagtctggacatggacagcgcggagaaaccggagcgtacatatcgtacgtgaagatttcgagcactgcccggggccgaactgacaaataaaatagcctgataggataggctgttagcattatttcgtgtttttgctgctcggtaattcaatgcggaaacaaacgtcttgcccgctctcgtcgaccagatacagttccccttgcatacggcgaatacaatccctggcaatgcttaatcccagaccgctgcccttcaccgccccttttcgctggtggcttccctgaaaaaagggttcgaagatcatggcgcgttcctcttgcggaatgggcgtgcctgtattgatgacatcaatataaacccgcgcaccatgtaaactgctgcgaaggcaaatgttaccggattcagccccgtagtgcaccgcattggagtaaagattatccagtacgctcatcagcagcattggctccgccaggcaagctgttgctttgagatcgacgtcggtatgcatcattttagcccgtgcgggcaggctatgagcagaaaccactgtctccaccagcggtgctaactcaacattctccagttccaccgcactgtccgcctgtttacggttgtaatcaagcagttgttcgatcagtttttgcaaattgcggctgctgctatcaagaatgctcaccacctctttttgctctggcgtaagcggcccgacaacctggtcagccagtaattcagtgccctcgcgcatactcgccagtggcgtttttaattcatgagataaatgtcttaaaaattgatggcgttgggattccagccaactcaggcgctcacttaaccaaagaatacgttgcccaacgctgcgtaactcgctcggtccactgaagctgacgctattgcccagagaacgcccttcccccagacggttgatcatgcgctcgatatttttcaccggcccgataatcatccgcgtgaaaagcagtaccattaccagactcaccagaaatagcaccaggctttgccaaccaaaatattgcccacgttcggcgatttcacgctgaagctgctgcccacgagagaacaccactgtgcgcgtggcctgtaccatttcggtattggcactggcaaaggcttcaagacgtgcggcggcggcagcatcgggaccgctgttgttacactgaagttgagccagattgtgcaaatcctgacgtaatgcctggtagagtttatcgtccggcagcacgcctgcgtgggcatcgagcatttcgctgtaacgcttgcgctggctttgataaaccttcgccagggttgggtcgtccagcacgcaatactgacggtaactacgctccatctccagcgccgcgttggtcatcgcttcactgcgccgggcatcaataagcgtagtgcggttaaccagcgccgcctgatcgctaagcgcattcaggctttgccaggcttgccatgccagcaccaacaggggcagcagaatcagcaaaaatgccagcattaccagttgtcgtaaactgcggggaaaaacgggccagcgtttcaaggtgttactctcgtcagacgcgaatagcctgatgctaaccgaggggaagttcagatacaacaaagccgggaattacccggctttgttatggaataaggcggtgcctaactcgacgtttcgcccgatggttgatatagctacgctgatatcagaagttggacggcaggcaccttgttgtgcgtcattcgtattttatgtagcacgtcccgaaggggctgacataagtcggtgaatgagccactggttactattatgcagtaactgtgccaataaagaaaatagtttggtaacgtactgattatacgttgctttgaggggtttatgtctcctccgctgtttgaatgtaaatcagccactgtgtcgctaaaaagagacaacttaagataaacttattagataatattaaaatcaatgagttaagtgtcgccagaaagcgacacggcaaaccacccattgtcgtgatttacagacacaaaaaagctcccggagttgggagcttatgatagtggttggtgcttaatgccgcatccgggctgcaaaaccaatgggctgacgacttaccccaactgcttacgcgcattgcggaaaatgcgcatccatgggccatcctcgccccagttttccggatgccaggagttgctgacagtacggaaaacacgttccgggtgcggcatcataatggtgactcgaccactttcagtcgtgactgccgtaataccgttcggactaccgttcgggttagccgggtaggtttcagtgactttgccgaagttatcgacatagcgcagtgccaccagccctttgctttccagtgccgccagatgcgccgcatcacgcacttccacgcgcccttcaccatgagagacagcaatcggcatttggctgcccaccatcccctgcaacagcagagacgggctttgggttacttcaaccaggctgaaacgcgcttcaaagcgatcggaggtattgcgcacaaaacgtggccacaactcactacctgggatcagttcacgcagattagacatcatctggcaaccgttacatacccccagcgccagcgtttgcggacggtggaagaaggttgcaaactcatcgcgtacacggtcattgaacaggatactcttcgcccaaccttcaccggcacccagcacatcaccgtaggagaaaccaccgcacgcgaccagggcgtggaaatcttccaggcccgtgcgtccggtcagcaggtcactcatatgcacgtcgatagcatcaaagcctgcacggtggaaagctgccgccatttcaacatggctgttcacgccctgctcacgcagtacggcaactttcggacgtgcgccagtggcaatatacggtgctgccacatcttcgttgatatcgaagctcagttttacattcaggcccggatcggcgtcgttagatttcgcctgatgctcctgatcggcacactccgggttgtcacgcaggcgctgcatctgccaggtagtttctgcccaccagacacgcaacgtggtgcggctttcgctgaatacagtctgcccgttggcggtaatcacaaaacggtcaccggaaaccgcctgccctacataatggacacaatcagcaagcccatgctgtgccagtacggactcgaccgcttcacggtcagcggcacgaacctgaatcaccgcacccagttcttcgttaaacaacgccgccaggcgatcgtcacccagagtggcgatatccgcgtcaatgccacaatgaccagcaaaggccatttccgccagcgttaccagcaggccgccatcagagcggtcgtgatacgccagcagcttacgctgtgcaaccagcgcctgaatcgcgtcatagaagcctttcagttgcgcgacatcgcgtacatctgccggtttgtcgccaagctgacgataaacctgcgccagcgccgttgcgcccagcgcgttattgcctttgcccaaatcaatcagcagcagtgcgttatcttcggtagaaagctgcggcgtgatggtgtgacgtacatcttccacgcgggcaaatgcagaaatcaccaggctcagcgggctcgtcatttcgcgctcttcgttaccttcctgccagcgggttttcatgctcatggagtctttacccaccgggatcgtcaggcccagcgccggacaaagctcttcgcccacggctttaacggcttcatacaggcccgcatcttcaccagggtggcctgccgccgccatccagttggcggaaagtttgatgcgtttgatatcgccaatttgtgttgcggcgatgttggttaacgcttcaccgaccgccagacgggcagaggcggcgaaatccagcagcgcaaccggcgcacgctcgccaatcgccatcgcttcaccgtagtagctgtcgaggctggcggtagtgaccgcgcagttagcgaccggcacctgccacggccccaccatctgatcgcgcgctaccatgccggttacgctgcggtcgccaatggtcaccaggaaggttttttccgccacagtcggcagatgcagcacacgtttcaccgcgtctgcaatggtgatcccttcacgggccagcgcgtcgcctttcgctttcagcgtttgtacatcgcgggtcatcttcggcgttttaccaagcaggacgtccagcggcagatcgatcggctgattatcaaaatgacgatcgtgcagagaaagatgcagttcttcggtcgcttcaccaatcaccgcgtagggtgcgcgctcacgcttacacagttcgtcaaacagcggtaattgatcggcagcaaccgccagcacgtagcgttcctgggattcgttacaccagatttccagcgggctcatgcccggttcgtcgcttagaatctcgcgcagttcaaatttaccgccgcgcccgccgtcgctcaccagttccggcatggcgttagaaagaccgccagcgccaacgtcgtggataaacaggattgggttggcatcaccaagctgccagcaacggtcgatcacttcctggcagcgacgctccatctccgggttgtcgcgctgtacggaagcaaagtcgaggtcggcatcagactgaccagacgccatagaagacgctgcaccaccgccaagaccgatgttcattgccgggccgccgagaacgaccagcttcgcaccgacgttgatctcgcctttttgtacgtgatcggcgcgaatgttgccgatcccgcccgccagcatgatcggtttgtgataaccgcgcagctcttcgccgttgtggctgttcactttttcttcataagtacggaagtagccgttcagtgccggacgaccaaattcgttgttaaacgccgcgccgcccagcgggccttcggtcatgatgtccagcgcggtgacaatgcgctcaggcttaccgaaatcttcttcccacggctgttcgaagccaggaattcgcaggttggaaacggagaaaccaaccagacccgctttcggctttgcgccgcgcccggtggcaccttcatcgcggatttcaccgccggaaccggtcgccgcgcccggccacggagaaatcgccgtcgggtggttgtgagtttcgactttcatcagaatatgcgccggttcctgatggaaatcgtagcggcccgtttcgtggtcagcaaagtagcggcccacttcagaaccttccattacggcggcgttatctttataagcagagagaacgtgatctggcgtggtttcgaaagtatttttgatcatcttgaacaggcttttcggctgctgttcaccatcgataacccagtcggcgttaaaaattttgtggcggcagtgctcggagttcgcctgggcaaacatatacagttcgatgtcgttcgggttacgaccaagctttgtgaaagcatcctgcagatagtcaatttcatcttccgccagagccaagccaagacgcaggttagcgtcgatcagcgcctgacggccctgccccagcaaatcaacgctggtaaccggagtcggttgatggtgggcaaacaactgctctgcatcatctaaagcaaaaaagaccgtttccatcatgcggtcgtgcagttcagcggtaacctgctgccattgttcattggtcagcgtaccggcttctatatagtaagcaacgccgcgctcaaggcggtttacctgttgtagcccgcagttatgggcaatatcggtcgctttgctagaccagggagagatggtgccaggacgcggggtcaccagcaggagtttgccttgcggggcgtggctggcgagtgccgggccatatttcagcaggcgttcaagttgtgcgtgctcatcatcgtttaacggcgcattgaggtcagcaaaatggacatactcggcgtaaatattgtgaaccgggagcctggcagcctgaaaacgtgccagcagtttgttgattcggaatgcgctcagtgcagggctaccacgcagaatttccatcataagtctctcgtcttctaagctttcggtgtacccaagggggggaaacgggcgtcattataaagaatctgatgcgctgacgaaaccgtttgcgtggaaataaaatcaccatcgtgaattagcaacgcgtgccgccaatggctgtaataagttgccatctggcgcaggtttacgcaaaatgccgctcatttatgagtaaacctttcactattattacgttttttcaagctgggacgcgcacgacacagagaattaactaattgaaaaaattaaagattaattatctgttcatcggcattctggcactgctgctcgcggtcgctctctggccatccattccctggtttggtaaagccgacaaccgtatcgccgccattcaagcgcggggagagttgcgtgtgagcaccattcatactcccctgacttataacgaaatcaacgggaaaccttttggcctggattacgaactggcgaaacagtttgccgattacctcggcgtaaaactgaaagtgaccgtgcggcagaatatcagccagctgtttgacgaccttgataatggtaacgccgacctgctggcggcaggacttgtctataacagtgagcgggtaaaaaattatcagcctggccctacctattattccgtgagtcaacaactggtttataaagtgggtcagtatcgcccacgtacgctgggcaacctgacggcggagcaactcaccgttgcaccgggtcatgtggtggttaacgatctccagaccctgaaagaaacaaaattcccggaattaagctggaaggtagacgacaaaaaaggctctgcggaattaatggaagatgtcatcgaaggaaaactcgattacaccattgctgattctgtcgccatcagcctgtttcagcgcgttcacccggagctcgccgtagcgctcgatatcaccgatgaacaaccggtgacttggtttagcccgttagatggcgataataccctttccgccgccctgctcgacttcttcaacgaaatgaatgaagacggtacgctggcacgcattgaagagaaatacctggggcatggcgatgattttgattacgtcgatacgcgcacatttttacgcgccgtcgatgcggtactgccgcagttaaagcccctgtttgagaaatacgccgaagaaattgactggcgtttgctggccgctattgcttatcaggaaagccactgggatgcacaggccactagtccgacgggtgtgcgcggcatgatgatgttaaccaaaaataccgcgcaaagcctcggcattacggatcgtaccgatgccgaacagagcatcagcggtggcgtgcgttatttgcaggatatgatgagtaaagtgccggaaagtgtgccggagaacgagcggatctggtttgccctcgctgcgtacaatatgggctatgcgcatatgctggatgcccgcgccctgacggcaaaaaccaaagggaatcctgacagttgggctgacgtaaaacagcgtctgcctttacttagccagaaaccctattacagcaagctgacttacggctacgctcgtggacatgaagcctacgcttatgtcgaaaatattcgtaagtatcagattagcctggtgggttatctgcaagagaaagagaagcaggctacagaagcggcgatgcaactggcgcaggattatccggcggtaagccctacggagttgggcaaagagaaatttccttttctcagctttctttcccagagcagtagtaactatttgacccattctccctctctgctgttttccaggaaagggagtgaagagaaacaaaattaatccgtgctggattgcgcttttttctgcgctttaatttcctggcggcgcatgcgaaagaagtcactgagcaacgccgcgcactcatccgccagtattccttccgtaatttccactcggtgattcatacccggatgatgcagcacatccattaaagatcccgcagcgccagttttcgcgtcacgcgcaccaaagaccacgcgaccaatgcgactgtggatcatcgctccggcacacattacacatggttcaagcgtgacatacaacgtggcgtcgatcagacgataattttgcatcaccagaccaccctgccgcagggccatgatttctgcatgtgcggtgggatcatggcgaccaatcgggcggttccagccttcgccgattacccgattgttatgcactaataccgcgccgaccggcacttcccgctcatcccaggcacgtttcgccagcgtcagcgcgtgacgcatccagtattcgtggctaaattcgacttcagacaaaaagaaaactccggttataaaagcgcggcgcattatacacggacgctatgctttactttattccagttgctggagttcaccgcgcggggttactcgccaacgatgctgacagaaataaagcagcggattgtcctgattactgtcgctatagccactgtacagccgcagcggagtgccgattttgcgctccagttgtgcgaccttttcatgtcccagacaacgcatcgtcaatacccaaccaccatagccacgctgaatttggctggcgataagattaacccgcggcagccagggcgtatcgaaataaaccgcttcaaccagcggctgcggagagccggtaatcaaccagatatcagcatcggaacttaacaggtaggtggttaatcgctcctgaaccagcggaaaggcggtaacattgtcgcgaaaccagcgcacgaaatcggcctgcaacgtctgtaaacgtgcttcgctgtgaccaaaagtgcacccccacagaagcagactcatcggccagcgtgccgcacgaccttttatcaataacgcaatggctataatcggtaacaacggcaggacaagtaacgcattcagcggttggcgacgtagtaaatagcgcagaaaactgccgaacatatcctgctgatgcaatgttccatctaagtcaaaaaacaccacacgacgctcgtgagttgccaaaccatattcctctggactgaaacatcctgattaattttcgctactacatagcctaacagatagatcatcacttttccggcaacaatcgaccgcatcatggctaactggaatttttaattcatggcaattagcggcaatggaatataaaattcactcgcgtgtgtctcatattgcctgttgtcgccactatttcatcgcgaggaaagatatgaacggcttacttcgtatccgtcagcgttaccaggggcttgcccagagtgataaaaaactggcggattatctgctgctacaacctgatacggcgcgccatttaagctctcagcaactggccaacgaagccggagtcagtcagtccagcgtcgtgaagttcgcgcaaaaactcggctataaaggttttccggcgcttaagttggcgttgagtgaagcgctggcaagccagccggaaagtccctccgtgcccattcataaccaaatccgcggtgatgatccgttacggctggtcggcgaaaaactgattaaagaaaatactgccgctatgtacgcaacgctaaacgttaatagtgaagagaaactgcatgaatgcgtaacaatgttgcgctctgcgcggcggataattctgaccggtattggcgctagcggtctggtggcgcaaaactttgcctggaagctgatgaagattggcttcaatgctgccgcagtgcgcgatatgcatgcgctactcgcaacagtacaggcgagctcccctgacgatctgttattagccatttcctacaccggtgtacgacgcgagttaaacctggcggcagatgagatgctgcgagtgggcggaaaagtgctggcgattaccggctttactccgaatgccctgcaacagcgtgcttctcattgcctgtataccattgccgaagaacaagcgacaaacagtgctagtatctctgcttgtcacgctcagggaatgttaacggatttgctgttcattgcgctgattcagcaggatctggaactggcaccagaacgtattcgtcatagtgaagcgctggtgaaaaaactggtctgagtaaagaatgcgcgtataatgcccgcccggtttgtgttgttttgagagtttccttatggcgttgttaatcactaaaaaatgcatcaattgtgatatgtgtgaacccgaatgcccgaatgaggcgattagtatgggagatcatatctacgagattaacagcgataagtgtaccgaatgcgtagggcactacgagacaccaacctgccagaaggtgtgcccgatccccaatactattgtgaaagatccggcgcatgtcgagacagaagaacagttgtgggataaatttgtgctgatgcaccacgcggataaaatttaatattctactctggaagtagagtattaattatattactgggaagccttaacgccattatatttatttaattgatgacattagcataatcattcactaagttaatttatatagtatctgcccagacacttatttatagttattaaaggtgcgtccgactggttcaccggacgcaccttaagtacgtttccttgtgttataagaacagaaggatcagctgtaaaacagcaatgatgattttgatgacccgtttaatcaggtatcggcaatcagtcattcgtttttccttaaacaaggaatgcagccattcagattagcccttacatctccccaaaactgaacgtgcgagttattgagggtgcatgctgcactccacaccagagctttgacgacaccactcgtttcaatgggggaattctgtggcatggtgtaaagcacagcaaaatcttcaataacgaagccaattttaatgtacttacgaattggcggtcacgttaatctttccatcaatattgctttcttcgtaaaggctcgagtttttatgctaaagattgcaagttgcttgtaaaagataagtacactgatccataatcgctgttgttgagggtgcatgctgcacaaaattaaagttaaaaagtaaaacccccgttccttaccagttcgggggttttactttttaaagagaacggtattatttttaactttcaataattaccgtggcacaagcatagtgccgctcatctgccagcgttacatgcatatttgcaacgcccagcttttccgccagttttaatgcctcgccccatagccgtagccgtggtttgccgagctcatcattgaatacttcaaattgattaaacgccagaccattgcggatcccggtgccaaacgcttttgctgcggcttctttcacagcaaaacgcttcgccagaaaacgcaccggctggtggtgcgttttccagatagcccattcgttatcgcttaatacgcggcgtgccaggcgatcaccggatcgggcgatcaccgcttcgatgcgagcgatctccacaatatccgtgcctaaacctaatattgccattagccacgcgcttccagcatcagacgcttcatttctgccaccgcatctttcagtccggtcatcactgcacgaccaataatggcatgaccgatattcagttcatgcatctcagggatggcggcaatggctttcacgttgtgataggtcagaccgtgtccggcgttaactttcagaccgaggcttgcggcaaaggtcgcggctttggcgatacgcgccagctcttgcgcctgttcggcgtcagttttggcatcagcatagcaaccggtgtggatctcgataaacggtgcgccaacctctgccgcagctttgatctgctcttcatcggcgtcaataaacagagaaacctgaatcccggcatctgccagacgtttgcaggcatcgcgcattttgtcacgctgccctgcgacatccaggccgccttcggttgttacttcctgacgcttttccggtaccaggcagcaaaaatgtggcttcgtctcaacggcgatcgccagcatctcttcggtcaccgccatctccagattcatgcgggtatccagcgtctgacgcaggatgcgcacgtcgcggtcagtaatgtgacggcgatcttcacgtaaatgcacggtaatgccgtccgctcccgcctgctcggcaataaacgcggcctgcaccggatccgggtaagcggtaccgcgcgcgttgcgcagcgtagcgatatggtcaatgttgacgcctaacagtaattcagccatgacaatcctcatcattcataatgtgttttcaccgttcgcttaggcataaactgccggaacagttccctgctctttaaaggtttaccgccaagatacggcttaagcgccatgcgggtaaagcgtttcgcggcgcgcagtgtgtctgcgtcaggaaattcccgtgcgtttaacgcttttaactgccttccggtgaacgttttattgtcgataacgacgcttgcgataaaccctttttcttcgcgataacgatacgtcatggtgtcatctaccggctcgccgctacccgcacaatgggtaaaattgacgccataacccagatgcccgagcagtgccagttcaaagcggcgcagcgcgggttctggcgtaccagtgacccctgcaagagactgaatgcagtgcaagtaatcgaaaaaaagttcagagaagcgcgtctcgtattccagtacgcgggagagaagttcgttgatgtacagaccgctgtaaagcgtgataccgcttaatggcagcgccaggctgacggcttcagcactgcgcagcgttttgacttcgccacgcccgccaaaacgtagcaagagaggggtgaaaggctgtaatgcacctttcagggtagagcgtttagagcgtgcgcctttggcaaccagacgcacgcgcccgctttcctccgtgaagacgtccagcatcaggctggtttcgctccacgggcgactatgcaggacaaatgcgcgctgccagccttccatcggagttactcttaaagatcgtcaacgtaaccgagactgcgcagtgcgcgttcgtcgtcggcccaaccggatttcacttttacccacagttcaaggtgaacaggcgcttcgaacatttcctgcatgtctttacgcgcttcaatcccgatggttttgatcttggcccctttgttgccaatgaccatcttcttctgcccttcacgctcaacgagaatcaaaccgttgatgtcataaccaccgcgttcgttagagacgaaacgttcgatctccacggtcacggagtacggcagttcagcgccgaggaaacgcatcagtttttcgcggatgatttcagacgccataaaacgctgactgcgatcggtgatgtaatcttccgggaagtgatgagtcgcttcaggtagatgcttacgcacgattgccgcaatagtgtcaacattcagcccggtttcggcagagattggcacgatatcgaggaagttcatctggcttgccaggaactgcaggtgcggcagcagatcggctttctcctgcacgttgtccactttgttcaccgcgaggattaccggcgctttgccttcgcgcagtttgttgagcaccatttcgtcgtccggcgtccagcgggtgccttcaacgacaaaaatcaccagctcaacatcgccaatagagctgctcgccgctttgttcatcaggcggttaatggcgcgtttttcttccatatgcaggcccggtgtatcgacgtagatcgcctgatacgcgccttcagtatggatccccacaatgcggtgacgagttgtctgcgccttgcgggaagtgatggagattttctgccccagcagtttgttcaacaatgtggatttgccaacgttcggacgtccgacgatggcaataaatccgcagtaacttttatcgatgctcattccagctccagttttttcaacgcctgttcggcggcagcctgctcagccttacgacggctactacctgtgccaaccaccggttcactcaggccgctgacctggcagtggatagtaaattcctgatcgtgcgcttcgccacgtacctggactaccagataagtcggcagcggcagatggcgaccctgcaaatattcttgcaagcgcgttttcggatctttttgtttatcgcctgggctaatttcgtccaaacgagtttgataccagttgaggattaatttctcgacggtttgaatatcactgtcgaggaatacgccaccaattaatgcttcgacggtgtcggcgagaatactctcacgacgaaatccaccgcttttaagttcacctggccctaaacgtaagcactcgcctaactcaaattcgcgcgccagttccgccagcgtattgccacggaccagcgtggcgcgcatccggctcatatcgccttcatccacacgagggaaacggtgataaagcgcattggcgataacgtagctcagaatagagtcgcctaaaaattctaaacgctcgttatgtttactgctggcactacgatgagttaatgcctgctgcaacagttcctgatgattaaaagtgtagcccagcttccgttgaagccgattaattacgatggggttcatgcgataccaataaataaatgcgtcaacaattcagcacacgaaacagacctgatatacatggttctgctaactgcttcgctgcagtttcagtttaccggtatatggggaccaacgctgtttcgtgtgccgtggcaacctggaggtgccaaccttaaacttcgggggaatattctatacacaacgacgggggatgtcgttagccacgggagatttatctcataaataattcacgttgtcgccataacggcgacaacgtgaacgaagatggctattaatggatgccgccaatgcgacttaagcgcagaccagtcggccattcgccttcttgcttatcgaagctcatccagatagccgttgcccgaccgaccagattcgcttccggcacaaagccccagtaacggctgtccgcgctgttgtcgcggttgtcgcccatcatgaagtattgtcccggaggaacaatccaggttgccagttgttgccctggctgctggtaatacatccccacctgatcctgcgcaatcggcactgtcagaatgcggtgcgtcacatcacccagtgtctctttacgctcggaaagacgaattccattttctttggtttcgtttttcggcacttcaaagaatccgctggtcgcttccccaccattacggcgactgaaggtctgaacgaaatcgctcggttccacgttactgtaggtgaccggcagcgcgttttcacacgcctggccggaactgcatcccggttgaatcgtcagctctttactgaccggatcgtaagtgactttatcgcccggtaaacccaccgcgcgcttgatgtaatcaagctttggatcttccggatatttaaagaccacgatatcgccgcgtttcggatgaccggtttcgatcagcgttttctggtagataggatctttaatgccataagcaaacttctctaccagaataaaatcaccaattaacagagtcggcatcatgctaccactcgggatctggaacggttcataaataaagctacgcacaatcaatacgatagccagtaccggaaaaacagaagcaccggtttccagccagccaggcttcggcgcaacctttttcaacgttgctttatccagactgtccccggcagccgcctgcgccgctgcctgacgttcccgccgtttaggtgcgaaaaagaatttatccacgcaccataaaatgcccgtcaccagtgtggcaatcaccagaatcagggcaaacatattcgccatgccaactcctaagggttatttgttgtctttgccgacgtgcagaatggcgaggaacgcttcctgcggcagctcgacgttaccgatctgcttcatgcgtttcttaccttctttctgcttctgcagcagctttttcttacggctgatatcgccgccataacatttagccagtacgtttttacgcagctgtttcacggtggatcgcgcaatgatgtgcgtaccaatcgctgcctgaatggcgatatcaaactgctggcgtgggatcagatctttcatcttctccaccaactcgcgaccgcggttttggctattatcacggtgggtgatcaacgccagcgcatcaacacgttcaccgttgattaatacgtctacacgtaccatgtcggacgcctggaagcgcttgaagttgtaatccagagacgcataaccacggctggtagatttcaggcgatcgaagaagtcgagcaccacttccgccatcgggatctcgtacgtcagcgccacctgattaccgtggtaaaccatattggtctgcacgccgcgtttttctacgcacaacgtaataacgttgccgagatatgcctgcggcagcagcatgtgacactctgcaatcggctcgcgcagttcgtagatgttatttaccgcaggcagcttggatgggctgtcgacgtagataacttctctactcgtggtttcaacttcatacactacggtcggcgcagtggtgatcagatccagatcgtattcacgttccagacgttcctggatgatctccatgtgcagcaggccgaggaagccgcagcggaaaccaaagcccagcgcgctggagctttccggctcatagaacagactggcatcgttcaggctgagtttacccagcgcgtcacggaaggcttcatagtcgtcggaacttaccgggaacagaccggcgtatacctgcggtttgactttcttaaagccaggcagcgccttttctgccggattacgcgccagcgttaaggtatcgccgactggagcgccgtggatatctttaatcgcacatacgagccagcctacttcgccacatttcagttcagtgcggtcaacctgtttcggcgtgaagatgcccagacggtcggcgttataggtctgcccggtactcatgactttcactttgtcgcccttacgcagggtgccgtttttaatacggataagactaacaacgcccaggtagttgtcgaaccaactgtcgataattagtgcctgcaacgggccttccggatcgccttccggcggcggaatgtcgcgcaccagacgttcgagaacgtcctgcacaccaacgccggttttcgcactacagcgcaccgcgtcggtggcgtcgatgccgacgatatcttcaatttcttccgccacgcgttcaggatcggctgccggcaggtcaatcttgttcagtaccggcacaacttcgagatccatttccatggcggtgtagcagtttgccagggtttgcgcttctacgccctgcccggcgtcgaccaccagcaatgcaccttcacaggcagccaggctacgggaaacttcataggagaagtctacgtggcccggggtgtcgataaagttaagctgataggtttcgccgtcagacgctttgtagtccagcgtcacgctttgcgctttgatggtaatgccacgctcacgctcaagatccatggaatcgagaacctgcgcctccatttcacggtcagacaggccaccgcagatctggataatacggtcagacagcgtgcttttaccgtggtcaatgtgagctatgatgctaaagttacgtatattcttcataaagtatgattattgtgccttaatgcccggttaaccaggcttttagaagtcgctgttctgagcttaacgtctgtattaatagaaacgccgcattctacactacaacattgaggcgaggaaatgttcataccgtatggattgtggtatctggaaacgtcctcgcatttgttatgcaaaatgcaacaaagccagtgaaatcactggctcgcgtcttcgctagatgtttcaaatcgcacaaggccaggcggcaatgccacgcttaagatgatcggttgccattctgcccgggcagcaaacttacggctgtagccgcgcgcaatcaggaacccgccaataccaccgaggatcgcaccacataatgctgcgacgtcagaagcaaagagtagctgaaataggctagcgataaggaataatcccaccagcgggctcatataaaccagtaatgcggagctaagcaggctgccttcggcgatccccaattccactttttgccccggcactaacggctcatcacagggtacgacaatggtatgcgtggtttgcgggccaagtttatttaacacgcggctaccgcaaccggcgcgactagcgcagctgctgcaactagctttaacatcacaactgaccagcgcctgcccgttttgccaggagacgacggtagcccactctttgatcattgcgctgccccgaacttaatattctcggcaatgcgtttcgccgtttgcggcggcagttcaccgacaatggtgatttcggcgttatcacgtacgcttgtactgacggttctgcgtccggtgcgcaacatctgatcggtgctgcttggcgtagcgcggttaacgtttacgctgaagctgaataatccgtcggaatagagacgactttcgataggcatgttgtccatcgtcggtagcggacgtcgactactggaaacttcgctaaaaccctgtggcaaccaggttggcgtccagctgaatttagctttttcacctacaggaacagaaagcaacggcggcaaatttgccttcgccagcgtctgcatactgctgctgatatcctgattgacgttaaaagcaatcacgcgaaattgttccagcgtttcaccatcgcgatcaaggagatcaacccgcatcggtaatttgctttcggtgtccatccacacgatgtagctgtagcgtgtaccatctcgggcaaccacgcgaatgacttcgcaaagacgatcagcaatacgcgtgcgcccgacggagataaagtcgtagtaaggagaaaggcgtttgaaatcggtatagataaggcttggcagagaatcaacaatgtaatcgccattaagcgtgaacggttcaagtcccggttcaaaatagctgatttcattgccgcgctgtaccacttcccggcgcgggccatccatttgcaacaattgtgcaagaggacggttatcgaggcgtgcatgtcgataacgcagagactcaacaccctgtttattgatgctgatgaaactcagctcgtaattcagactctgactggccaggttcatctgctgtaataacgccccggacgcgggagtggcgctggcgttagcagagaataacaggctacctgtcactaaactcatggcaaaccaaagttgcttcattactggctttgcgttcctaaagtttgaattcctggcacctgtacagcggcttgctgggtttgcgcctgctcaaactgaagctgttcagagtggagtcggcgttgcagttcgtaatcctgcaacattgcattaatgcgacgacgctgctcctgtacctgctgctgttgaccattgtttgcggtcgcttcagaaggtactcccaggcttaccgggctggctttacccatcatcggcagtgtattaaataccggcgtttcgggctgctgggacgtttcagattgtccattatagtgctggacgccaacgataactgcaaggcttacgcatgcggctacgcccatttgggtaagctgtgccgcccacggacgtactttctgccagaatggcattttctgccattgatgcggcgcaggctgggcttccgggatcaatgtcgccggttgacgtactggctcttcttcaatggcggccatcacgcgactagagatatcgaaatggagcacctcgggagtatcaccccgcatactgtcacggattaagtgatagctttcccaggttttctgcatttctgggttatgagccagttcgttaagcagctcactatccagcgtttcgccatccattaaagcggaaagttgttctttctgcatgcctaatacccttatccagtatcccgctatcgtcaacgcctgataagcggttgaactttgttatcaatagcttccctcgctcggaagatacgactacgcaccgtacctaccggacaatccatgatagcggctatctcttcatagctcaggccatccagctcccgcaaggttattgccatgcgtaaatcttccgggagggactcaatagttcggaaaactatctgtctcagttcttcactcaacattaagttctcagggttgctaatttctttcaacgcgccgccactttcgaagttttcagcttcaatggcatccacatcactggaaggtggacgacgcccctgagcaaccaggtaatttttcgctgtatttacagcaatccgatacagccatgtataaaaagcgctatctccccggaagctatccagcgcacgataggctttaataaaagcttcttgtaccacatcgggaacatcaccgctcggcacatagcgggaaaccagactcgccactttatgctgatagcgcactaccagtaagttaaaggctttctgatctcccttctggacccgttcaaccaggacctggtccgttaactgctcgctcatccgaggtaaagtctccccaaaccaaatttccacgcgctatcgaaacgccactccattagctgcaatttgagcaagcaaagggttagagtgtctcgtttttgtaaagttccgtaacgcatctgtttttgtttgtcatgctgtagacggatcattatctatcattataagtctacagaatctgaacatcgcattatctgtgtagaaatgcccatttaactgcctgaagagtaacccaacggcctttttatttcaccacctaatcctccaccagccagtaacttctctttttctcgccgccctgcgtcagcgtgtttagcaactgtaacaaatattaaaatagcaggtgtttatccgcacaacatgatgctatgctgaccaaaccatgtttagtaaattaaacaaagaaaatgaatactctccctgaacatagttgtgacgtgttgattatcggtagcggcgcagccggacttagtctggcgctacgcctggctgaccagcatcaggtcatcgttctaagtaaaggcccggtaacggaaggtagtacattttatgcccagggcggtattgccgccgtgtttgatgaaactgacagcattgacagccatgtggaagacacattgattgccggggctggtatttgcgatcgccatgcagttgaatttgtcgccagcaatgcacgatcctgtgtgcaatggctaatcgaccagggggtgttgtttgatacccacattcaaccgaatggcgaagaaagttaccatctgacccgtgaaggtggacatagtcaccgtcgtattcttcatgccgccgacgccaccggtagagaagtagaaaccacgctggtgagcaaggcgctgaaccatccgaatattcgcgtgctggagcgcagcaacgcggttgatctgattgtttctgacaaaattggcctgccgggcacgcgacgggttgttggcgcgtgggtatggaaccgtaataaagaaacggtggaaacctgccacgcaaaagcggtggtgctggcaaccggcggtgcgagcaaggtttatcagtacaccaccaatccggatatttcttctggcgatggcattgctatggcgtggcgcgcaggctgccgggttgccaatctcgaatttaatcagttccaccctaccgcgctatatcacccacaggcacgcaatttcctgttaacagaagcactgcgcggcgaaggcgcttatctcaagcgcccggatggtacgcgttttatgcccgattttgatgagcgcggcgaactggccccgcgcgatattgtcgcccgcgccattgaccatgaaatgaaacgcctcggcgcagattgtatgttccttgatatcagccataagcccgccgattttattcgccagcatttcccgatgatttatgaaaagctgctcgggctggggattgatctcacacaagaaccggtaccgattgtgcctgctgcacattatacctgcggtggtgtaatggttgatgatcatgggcgtacggacgtcgagggcttgtatgccattggcgaggtgagttataccggcttacacggcgctaaccgcatggccagcaatagtttgctggagtgtctggtctatggctggagcgcggcggaagatatcaccagacgtatgccttatgcccacgacatcagtacgttaccgccgtgggatgaaagccgcgttgagaaccctgacgaacgggtagtaattcagcataactggcacgagctacgtctgtttatgtgggattacgttggcattgtgcgcacaacgaagcgcctggaacgcgccctgcggcggataaccatgctccaacaagaaatagacgaatattacgcccatttccgcgtcagtaataatttgctggagctgcgtaatctggtacaggttgccgagttgattgttcgctgtgcaatgatgcgtaaagagagtcgggggttgcatttcacgctggattatccggaactgctcacccattccggtccgagcatcctttcccccggcaatcattacataaacagataaaaagcctgggtcagcgccgtatacgcttcggaatagttctggtctggcccacgaatgactaagcgatcgctaaagcattctcccgcctgcggggagaatgccagcagcacccgatgcggcagtcgcgcttcgttttccgccacatccgtccgcaaacgtaaatgccagcccatgcttaatgccagctccgtaaaaccattaccaatctgctctggcagcactacgcagaaaaatccctcttcggtaatgcactccgccgcacaggtcagcaagcttgggtgatcaagcgtagtggtatagcgagcctgttcccgttgaggtgtgctgcactctactccctgctgatagtaaggtgggttactgatgattaaatcgaagcgtactgtctgctgtgtaatccactgctgaatatccgccgtatggacgttaatccgctctgcccacggggactggttgatattttcctgcgcctgcgcggcagcttcactttccagttcaactgcatcaatcatcacgctgtcatcggttcgctgcgccagcattaatgccagcaacccgctacccgcgccgatatcaaggcaacgttttaccccagccaccggtgcccatgcgcccaataaaataccatccgttcccactttcatcgcacagcgatcgtgagcaacaaaaaactgtttaaaagtaaatccattacgacgaagcacggatgtagactgactcatgaaaataaaaccttgcaggaaaaacggcgatagcaccgggtgagaacaatacccgagaagcgatatccatacaaacagatgaagattgcagccgtaacgtctataatcagcgccccacacagaggtagaacatgactgtaacgactttttccgaacttgaactcgacgaaagcctgctggaagccctccaggataaaggtttcactcgcccgaccgccattcaggctgccgccattccgcctgcgctcgatggccgtgatgtactcggttctgcgccgacaggcaccggtaaaacggcggcgtatctgctgccagcgttgcagcacctgctcgatttcccgcgtaagaaatccggtccgccgcgtattttgatcctcaccccaactcgcgagctggcgatgcaggtgtccgatcatgcccgcgaactggcgaaacatacgcatctggatatcgccaccatcaccggcggcgtagcctatatgaaccacgcggaagtgttcagcgaaaatcaggacatcgtggtcgccacgaccggacgtctgctgcaatacataaaagaagagaacttcgattgccgcgcggttgaaacgctgatcctcgacgaagcagaccgtatgctggatatgggcttcgctcaggatatcgaacatattgctggcgaaacgcgctggcgtaaacagaccctgctctttagcgcaacgctggaaggcgatgcgattcaggactttgccgagcgtctgctggaagatccggtggaagtttctgccaatccctccacccgtgagcgcaaaaaaattcatcagtggtattaccgcgccgatgatcttgagcataaaaccgcgttgctggtgcatctgttaaaacagccggaagcgacccgcagtattgtgtttgtgcgtaagcgtgagcgtgtgcatgagctggcaaactggctgcgcgaagcgggcatcaacaactgctatctcgaaggtgagatggtacagggcaagcgtaacgaagcgatcaagcgtttgaccgaaggtcgcgtaaacgtactggtcgcaaccgatgttgccgcgcgcggtatcgacattcctgacgtcagccacgtctttaacttcgatatgccgcgcagtggcgatacttatttgcaccgtatcggacgtaccgcgcgcgccggtcgtaaaggcaccgcaattagcctggtggaagcccatgaccatctgctgctgggtaaagtaggccgctatattgaagagccaattaaagctcgcgttattgatgagttacgcccgaaaacgcgtgcgccaagcgaaaagcagaccggcaagccaagcaagaaagtactggctaaacgtgctgagaagaaaaaagctaaagagaaagagaagccgcgggtgaaaaaacgccatcgcgacaccaaaaatattggtaagcgccgtaaaccaagcggaacgggcgtgccaccgcaaacgacagaagagtaatctcaatgccaggtttaagcctggtattaaaagtgctggcaaacgcaaaactgcctgatgcgctacgcttatcaggcctacgtggctcatgcaatatattgaatttgcacgatcttgtaggccggataaggcgttcacgccgcatccggcatgaataaagcgcactttgtcgacaagttaaatgccgggtttaatcccgacattatttttatccagccacaaaactctcttcaacacactgaataaaagtgtgcatcgccgggctaaccgcttttccagcatgatgtgcgcacatggccgtaatggtctggctctgttcgccaaaaggcaattcaattaattctccgcactccaactcttttgccaccgcaaagcgcggtaggtagctgaccccgatattcgccgcgacacaacgcttgatgctttcgatacttataagctcaatggtgttttccaccgtgatccgccgctgacgcagcgtgctctcaaatatctgccggaagacacattgcggttcgttgataataaagctacaggcgttatgtcttcccggctcagtaaaatcgacatctgcaatttgcggactagccaccagcaccagactttgttcacccaactctcgtcgattcagagcatcatcattccctacacgataaaagacgccaacatcggcctcatcattcagtagcgcatcacggatcacgtaacagttcaggctctgcaagcttaaacgcacttttggggcgcgttgccgaaaacgctgcaacacctgcggcattcggtaagagagcaacgtttcgccgctaacaacgcgtagttccccgtccggatcactctcctttttggcagcctcacgaagcgtatccatcactcgggtaagttcataaatgtgcggcagcaacttttttccttcgcgggtaaggcacatccgtcggccaattttctcaaataactggacactaaactcctgctcaagctgctgaatatgaaaagtcaccgtgctttgtgtacagcacaatttttggctagctcgcaaaaaggaaccctcttccaccacggttttaagcgtaataaaacggcgcagatccataaccccaaacctatcgaaaatatcgaatctagaatataaaaacattcatttttttaaatgttccgtgtcgggtactgtctaccaaaacagaggagataacaagtgacaccgacccttttaagtgctttttggacttacaccctgattaccgctatgacgccaggaccgaacaatattctcgcccttagctctgctacgagccatggatttcgtcaaagtacccgcgtgctggcagggatgagtctgggatttttgattgtgatgttactgtgtgcgggcattagttttagtctggcagtgattgacccggcagcggtacaccttttgagttgggcgggggcggcatatattgtctggctggcgtggaaaatcgccaccagcccaacaaaggaagacggacttcaggcaaaaccaatcagcttttgggccagctttgctttgcagtttgtgaacgtcaaaatcattttgtacggtgttacggcactgagcacgtttgttctgccgcaaacacaggcgttaagctgggtagttggcgtcagcgttttgctggcgatgattgggacgtttggcaatgtgtgctgggcgctggcggggcatctgtttcagcgattgtttcgccagtatggtcgccagttaaatatcgtgcttgccctgttgctggtctattgcgcggtacgcattttctattaacgaaaaaaagcggaagaggtcgccctcttccgcttagtaacttgctacttaagccttacaggctttcagtaaaggtacgagcgataacgtcgcgctgctgttccggagtcagagagttaaagcgaactgcataaccggatacacggatggtcagctgcggatatttttccggatgcttaactgcatcttccagagtttcgcgacgcagaacgttaacgttcaggtgttgaccaccttcaacgcgaacttctggtttcacttctactggaacttcacggtattcaatgtcacccagtttgcttactgcaaccacttcatcttctgcataacctgcttttgcaacgatgcaacgcgcttcgcctttttcgctgtccagcagccagaaagagttcagcagatcgtcgttagcggctttagtaatctggatacctgtaatcatgtgatgcctccccggcaaaattatttgatttgttcagcctgtcgcggccaattggtaaaaccattgttgcttgagtgtatatatactcctcaaacacccttgaatctttgatttaaatcaataaaaaccacacatcaagtatggtcgcaaatggattttattgttttacatcaacttatgcgggtgtgaaattttaccaatttacatttttttgcactcgtttaagtctaaaaaatgagcatgattttgttctgtagaaagaagcagttaagctaggcggattgaagattcgcaggagagcgagatggctaacgaattaacctggcatgacgtgctggctgaagagaagcagcaaccctattttcttaatacccttcagaccgtcgccagcgagcggcagtccggcgtcactatctacccaccacaaaaagatgtctttaacgcgttccgctttacagagttgggtgacgttaaagtggtgattctcggccaggatccttatcacggaccgggacaggcgcatggtctggcattttccgttcgtcccggcattgccattcctccgagtttattgaatatgtataaagagctggaaaatactattccgggcttcacccgccctaatcatggttatcttgaaagctgggcgcgtcagggcgttctgctactcaatactgtgttgacggtacgcgcaggtcaggcgcattcccacgccagcctcggctgggaaaccttcaccgataaagtgatcagcctgattaaccagcatcgcgaaggcgtggtgtttttgttgtggggaagccatgcgcaaaagaaaggggcgattatagataagcaacgccatcatgtactgaaagcaccgcatccgagcccgcttagcgcgcatcgtggattctttggctgcaaccattttgtgctggcaaatcagtggctggaacaacgtggcgagacgccgattgactggatgccagtattaccggcagagagtgagtaaatttgcggggaaatgccggatggcagagttgccacccggctgatttatcaggctttattctgacgccaccattcaccaagcaaaacgccggttgcgacagagatattcagcccggcaacgttgcccgtaccgtcaatcttcacgcgcagatcgttcggatcgcgtgcggcatccggtaacccttcatattcctgacccagcaccagtaccattttcgctggcagactagttttgaacagcggtttaccctgctcgctggaagtggtcactacggtgtaacctgcctgacggaaatcatccagcacgttaacaatgttgtcgccagtaatcggctgaacgtgctctgcgccgccttctgcggtacggatagccgccccgctctccagcagtgccgcatcctgcaccacgacacctttcacgccgaagtgcgcgcagctgcgcatcatgccacccaggttatgcgggttagattcgttttccagtgccagaacgcaatcctgcgcgcctgcctggcttacccactgctgcacggttgtaccgttacgctttttgatcaagaagcaaacgccgccgtgatgttccgtgccactcgcttttgtcaattccgcttcatccaccacatggtacgctttgcggtttgctgccatccagcgcaaagcttctttaaaacgcggcgttacactctggataaaccaggcgcgaacaatcgcttccggacggctctggaaaagtgcctgacatgcattttcgccgtagacgcgggtttcttccgcacgctgacgacgcaacacttccggatcaataaaacttttaccactgatgccaccgtgatcggccttttccggcgtctcatcacccggcgcgcgggaaaccgtgcgccacgggctatcttcccacttgcggtcacggggctgactctgtttgtcatcgcgggcggggcgacggccaccgtcagcacgagattttcctggacgcccgccccctttcccggtacgcgggttgtgggtacgtttatcagaatcatcatcactgcggacatacatcactttgaccttgccgcttttacctttcatttcatcgttcatgcttttctccaccagcgctgcgcgaagcgcgcagattacccgaagtccgcgcggttcgccatgatttcgtaccaaagcctgcgactatcatacctattgaataaaacagattgttgtctggaacaatgtccccgataatatgtaacatattagaaacataccggcgtcgttgccgataagtctccttactcatcccgaggttagttatgaataccgtttgtacccattgtcaggccatcaatcgcattcccgacgatcggatcgaagatgcggcaaaatgcggacgctgcggtcacgacttgtttgacggagaggtgattaatgcgaccggtgaaacactcgacaaattgctgaaggatgatctacctgtggtgatcgacttctgggcaccgtggtgcggcccctgccgtaatttcgcaccaatttttgaagatgtcgcgcaagagcgtagcggtaaagtgcgctttgtgaaagtgaataccgaagctgaacgtgaattgagcagtcgctttggaattcgtagtataccgacgatcatgattttcaaaaacggtcaggttgtcgacatgcttaatggcgcagtaccgaaagcgccgttcgatagctggctgaacgaatctctttaatcttaccggggcgcatcttgtgccccgttttctcctctgcgacaatggcgttttttcgacgctctcttatgaccgaaaacgctgttctccagttacgcgccgagcgtattgcgcgcgcaacacgtccttttcttgcccgcggtaatcgcgttcgtcgctgccaacgctgtcttttgccagagaaattatgtctctgtagcacaattaccccagcacaagcaaaaagtcgcttctgtttgctgatgttcgacaccgagccaatgaagcccagtaataccgggcgtctcattgctgatattttgcctgataccgttgcgtttcaatggagccgtaccgaacccagccaggatttgctggagttggtgcaaaacccggactatcagccaatggtggtctttcccgctagctatgctgatgagcaacgggaagtgatcttcacaccacctgccggtaagccaccgctgtttatcatgctcgatggtacctggccggaagctcgcaagatgtttcgtaaaagtccgtatctggataatcttcccgtcatttccgtcgatctttcccggctttctgcctatcgcctgcgtgaagcccaggctgaaggccaatattgtactgccgaggtagccatcgcactgttagatatggccggcgataccggggcggcggcagggttaggcgagcattttacccgctttaaaacacgctatctggcaggaaaaacgcaacatctgggtagcatcacagcagaacagttagaaagcgtttaaaatcattcggtcacttctgcgggagaccggtatgagtcagcgaggactggaagcactactgcgaccaaaaagcatagcggtaattggcgcgagcatgaaacccaatcgcgcaggttacctgatgatgcgtaacctgctggcgggaggctttaacggaccggtactcccggtgacgccagcctggaaagcggtgttgggtgtgttggcctggccggatattgccagcttgccctttacacccgaccttgcggttttatgtaccaatgccagccgtaatcttgctcttctggaagagctcggcgagaaaggctgtaaaacctgcattattctttccgccccggcaagccaacacgaagatctccgcgcctgcgccctgcgccataacatgcgcctgcttggaccaaacagtctgggtttactggctccctggcaaggtctgaatgccagctttagccctgtgccgattaaacgcggcaagctggcgtttattagccaaagcgctgccgtctccaacaccatcctcgactgggcgcaacagcgtaagatgggcttttcctactttattgcgctcggcgacagcctggatatcgacgttgatgaattgcttgactatctggcacgcgacagtaaaaccagcgccatcctgctctatctcgaacagttaagcgacgcgcgacgctttgttagcgcggcccgtagtgccagccgtaataaaccgattctggtgattaaaagcggacgtagcccggcggcacagcgactgctcaacacgacggcaggaatggacccggcatgggatgcggctattcagcgtgccggtttgttgcgggtacaggacacccacgagctgtttagcgcggtggaaacccttagccatatgcgcccgctacgtggcgaccggctgatgattatcagcaacggtgctgcgcctgccgcgctggcgctggatgccttatggagtcgcaatggcaagctggcaacgctaagcgaagaaacctgccagaaactgcgcgatgcactgccagaacatgtggcaatatctaacccgctcgatctacgcgatgacgccagcagtgagcactatattaaaacgctggatattctgctccacagccaggattttgacgcgctgatggttattcatagccccagcgccgctgctcccgcaacagaaagcgcgcaagtattaattgaagcggtaaagcatcatccccgcagcaaatatgtctctttgctgacgaactggtgcggcgagcactccagccaagaggcacgacgtttattcagcgaagccgggctgccgacctaccgtaccccggaaggaaccatcactgcttttatgcatatggtggagtaccggcgtaatcagaagcaactacgcgaaacgccggcgttgcccagcaatctgacttccaataccgcagaagcgcatcttctgttgcaacaggcgattgccgaaggggctacgagcctcgatacccatgaagttcagcccatcctgcaagcgtatggcatgaacacgctccctacctggattgccagcgatagcaccgaagcggtgcatattgccgaacagattggttatccggtggcgctgaaattgcgtagcccggatattccacataaaagcgaagttcagggcgtcatgctttacctgcgtacagccaatgaagtccagcaagcggcgaacgctattttcgatcgcgtaaaaatggcctggccacaggcgcgggtccacggcctgttggtgcaaagtatggctaaccgtgctggcgctcaggagttgcgggttgtggttgagcacgatccggttttcgggccgttgatcatgctgggtgaaggcggtgtggagtggcgtcctgaagatcaagccgtcgtcgcactgccgccgctgaacatgaacctggcccgctatctggttattcaggggatcaaaagtaaaaagattcgtgcgcgcagtgcgctacgcccattggatgttgcaggcttgagccagcttctggtgcaggtttccaacttgattgtcgattgcccggaaattcagcgtctggatattcatcctttgctggcttctggcagtgaatttaccgcgctggatgtcacgctggatatcagcccgtttgaaggcgataacgagagtcggctggcagtgcgcccttatccgcatcagctggaagaatgggtagaattgaaaaacggtgaacgctgcttgttccgcccgattttgccagaagatgagccacaacttcagcaattcattagccgagtcaccaaagaagatctttattaccgctactttagcgagatcaacgaatttacccatgaagatttagccaacatgacacagatcgactacgatcgggaaatggcgtttgtagcggtacgacgtattgatcaaacggaagagatcctcggcgtcacgcgtgcgatttccgatcctgataacatcgatgccgaatttgctgtactggttcgcagcgatctcaaagggttaggcttaggtcgacgcttaatggaaaagttgattacctatacgcgagatcacggactacaacgtctgaatggtattacgatgccaaacaatcgtggcatggtggcgctagcccgcaagctcgggtttaacgttgatatccagctcgaagaggggatcgttgggcttacgctaaatcttgcccagcgcgaggaaagttgagtaaggtactggaaatgttgaccacttaatcgggactggtgttattattgcccgcttatgtcgtctgcattgcacagaggacccttcaatgaacagagaagaaatgcactgtgatgttgagtaaatttaagcgtaataaacatcaacaacaccttgcccaactacccaagatttctcaaagtgttgatgatgtcgatttcttttacgctcccgccgacttccgggagacgctgctggaaaaaatagccagcgcgaagcagcgcatttgcattgtcgccctgtatctcgaacaggatgacggtggcaaaggcattctgaacgcgttgtatgaggctaaaaggcagcgtccggaactggatgtgcgggtgctggtcgactggcatcgtgcacaacgtggacgcattggcgctgcggcatctaacactaacgctgactggtactgccgcatggcgcaggaaaatccgggcgtagatgttccggtttatggcgttccaatcaatactcgtgaagcccttggtgttctgcactttaaaggctttatcatcgacgatagcgtactttatagcggtgccagcctgaacgatgtttacctgcatcagcacgataaatatcgctacgaccgttatcatctgatccgtaaccgtaagatgagtgacattatgtttgaatgggttacacagaatattatgaatggccgcggcgttaatcgtctggatgatgttaatcggccaaaaagcccggaaatcaagaacgatattcgtctgttccgccaggagctgcgtgatgccgcttatcatttccagggcgatgccgacaacgatcagctttctgtaacgccgctagtggggctggggaaaagcagtctgttgaacaagaccattttccatcttatgccttgtgccgagcagaaactaaccatctgtacgccatacttcaacctgccagcaatccttgtgcgcaatattatccagttgctgcgcgaagggaaaaaggtcgaaattattgttggtgataaaaccgcgaatgacttctacattccggaagatgaacctttcaagataattggcgcattgccttatctctatgagatcaatctgcgtcgtttcctgagccgtttgcagtattacgtcaatactgaccagctagtggttcggttatggaaagatgacgacaacacctatcacctgaaagggatgtgggttgatgataagtggatgttgatcaccggtaataacctgaacccgcgcgcctggcgtctggatctggaaaacgccattttgatccacgatccgcaacttgagctggcgccacagcgagagaaagaactggagctgatccgcgagcataccaccatcgttaagcactatcgcgatctgcaaagtattgccgattatccggtgaaggttcgtaaactcatccgccgtttgcgccgtatccgcatcgaccgattaattagccgcatcctgtaatcacaaccccgtcctgtacggggtttgttttttggaggccacgttttgcgtattctttttgtctgttcgctattgttactttctggatgcagccatatggctaacgatagctggagcgggcaggataaagctcaacactttatcgccagcgcgatgctttccgccgccggaaatgaatatagtcagcatcaggggatgagccgggatcgcagtgccatgtttggattgatgttctctgtcagtttgggggcgagtaaagagctttgggatagccgccccgaagggagcggctggagctggaaggatttggcctgggatgtcgccggtgcaagcaccggctataccgtctggcaactgacccgtcattaaagacgcatccccttccctttgcgatgtagcatcaaagaaaccagaaacgccaccacggccatcaaggtcacataccagaagaaggctgtttccattcctatacttttcaggctcaacgctacgtactccgcgctaccaccaaatatagcattagcgaccgcataactcagaccaacgcctaatgcgcgaacctgtgccgggaacatctcagccttcagtattccactgatacttgtataaaaactcactatcagcagggcacacatcaccagaccaaaagcggcataagggctggaaacgttttgcaatgcactgagaataggaacggtaaaaatggctgccaggctaccgaaacataacatactggtacggcgaccaatcttatcgctcagcgcgccaatgagtggttgaataagcatgaatacaaacaatgcggcagtcataatgccactcgccacgttggcatgcattcccgcagtatttaccagatacttctgcatataagtagtgaaggtatagaaacaaagggagcccgcagcggtaaaaccgagaaccatgatgaatgcacggcgattgcgccataatcctttcagagatccagcttcttttaaagcgcgcgtttcttgttggctagtttcatctaactgacgacgtaaccacaacgccacaacagctaacacagctcctaacgcgaaaggaatacgccatccccactctctgagtgcagcgtcttccatggtgtgttgtaaaaccacgacaaccagtagggctagcagttgtccgccgatcaacgtcacatactgaaaacttgcgtaaaaacctttgcgcccttcaacggcaacttcactcatataggtggcgctggtgccatattctccgccaacagataatccctgaaataaacgagcgagaagcaataatgccggagcccacgtacctatagtttcataacctgggaggcaggcgataaccaggcttccgaaacacatcatacacacgcttaacagcatgctttttttgcgaccatgtttatcggctatgcggccaaatagccaaccgcctattgggcgcatcaggaatcccgcagcaaaaacacctgctgtttgtagtagttgagtcgtcgtgttcccggaagggaagaagatgtgggcaaagtagagactacagaagctgtagacatagaaatcgaaccactcgaccagattaccactagaggcccccacaatcgcccaaatgcggcgacgagtatcactacttgtcagtttgctgtctgccgttacagtactttcagccatgccattatgtctcctgccgtaatccgatgcttttgtcggtcgcttttgtttattttttttgtaaaggaaatattatacatttgttgcatatcattatgcaaccttaaccatgaatttagttagcaggaaaatggttattgaggagcttaaggataaatttctggtaaggaggacacgtatggaagtgggcaagttggggaagccgtatccgttgctgaatctggcatatgtgggagtataagacgcgcagcgtcgcatcaggcatttttttctgcgccaatgcaaaaaggccatccgtcaggatggcctttcgcataatttgatgcctggcagttccctactctcgcatggggagaccccacactaccatcggcgctacggcgtttcacttctgagttcggcatggggtcaggtgggaccaccgcgctacggccgccaggcaaattctgttttatcagaccgcttctgcgttctgatttaatctgtatcaggctgaaaatcttctctcatccgccaaaacagcttcggcgttgtaaggttaagcctcacggttcattagtaccggttagctcaacgcatcgctgcgcttacacacccggcctatcaacgtcgtcgtcttcaacgttccttcaggacccttaaagggtcagggagaactcatctcggggcaagtttcgtgcttagatgctttcagcacttatctcttccgcatttagctaccgggcagtgccattggcatgacaacccgaacaccagtgatgcgtccactccggtcctctcgtactaggagcagcccccctcagttctccagcgcccacggcagatagggaccgaactgtctcacgacgttctaaacccagctcgcgtaccactttaaatggcgaacagccatacccttgggacctacttcagccccaggatgtgatgagccgacatcgaggtgccaaacaccgccgtcgatatgaactcttgggcggtatcagcctgttatccccggagtaccttttatccgttgagcgatggcccttccattcagaaccaccggatcactatgacctgctttcgcacctgctcgcgccgtcacgctcgcagtcaagctggcttatgccattgcactaacctcctgatgtccgaccaggattagccaaccttcgtgctcctccgttactctttaggaggagaccgccccagtcaaactacccaccagacactgtccgcaacccggattacgggtcaacgttagaacatcaaacattaaagggtggtatttcaaggtcggctccatgcagactggcgtccacacttcaaagcctcccacctatcctacacatcaaggctcaatgttcagtgtcaagctatagtaaaggttcacggggtctttccgtcttgccgcgggtacactgcatcttcacagcgagttcaatttcactgagtctcgggtggagacagcctggccatcattacgccattcgtgcaggtcggaacttacccgacaaggaatttcgctaccttaggaccgttatagttacggccgccgtttaccggggcttcgatcaagagcttcgcttgcgctaaccccatcaattaaccttccggcaccgggcaggcgtcacaccgtatacgtccactttcgtgtttgcacagtgctgtgtttttaataaacagttgcagccagctggtatcttcgactgatttcagctccatccgcgagggacctcacctacatatcagcgtgccttctcccgaagttacggcaccattttgcctagttccttcacccgagttctctcaagcgccttggtattctctacctgaccacctgtgtcggtttggggtacgatttgatgttacctgatgcttagaggcttttcctggaagcagggcatttgttgcttcagcaccgtagtgcctcgtcatcacgcctcagccttgattttccggatttgcctggaaaaccagcctacacgcttaaaccgggacaaccgtcgcccggccaacatagccttctccgtccccccttcgcagtaacaccaagtacaggaatattaacctgtttcccatcgactacgcctttcggcctcgccttaggggtcgactcaccctgccccgattaacgttggacaggaacccttggtcttccggcgagcgggcttttcacccgctttatcgttacttatgtcagcattcgcacttctgatacctccagcatgcctcacagcacaccttcgcaggcttacagaacgctcccctacccaacaacgcataagcgtcgctgccgcagcttcggtgcatggtttagccccgttacatcttccgcgcaggccgactcgaccagtgagctattacgctttctttaaatgatggctgcttctaagccaacatcctggctgtctgggccttcccacatcgtttcccacttaaccatgactttgggaccttagctggcggtctgggttgtttccctcttcacgacggacgttagcacccgccgtgtgtctcccgtgataacattctccggtattcgcagtttgcatcgggttggtaagtcgggatgacccccttgccgaaacagtgctctacccccggagatgaattcacgaggcgctacctaaatagctttcggggagaaccagctatctcccggtttgattggcctttcacccccagccacaagtcatccgctaatttttcaacattagtcggttcggtcctccagttagtgttacccaaccttcaacctgcccatggctagatcaccgggtttcgggtctataccctgcaacttaacgcccagttaagactcggtttcccttcggctcccctattcggttaaccttgctacagaatataagtcgctgacccattatacaaaaggtacgcagtcacacgcctaagcgtgctcccactgcttgtacgtacacggtttcaggttctttttcactcccctcgccggggttcttttcgcctttccctcacggtactggttcactatcggtcagtcaggagtatttagccttggaggatggtccccccatattcagacaggataccacgtgtcccgccctactcatcgagctcacagcatgtgcatttttgtgtacggggctgtcaccctgtatcgcgcgcctttccagacgcttccactaacacacacactgattcaggctctgggctgctccccgttcgctcgccgctactgggggaatctcggttgatttcttttcctcggggtacttagatgtttcagttcccccggttcgcctcattaacctatggattcagttaatgatagtgtgtcgaaacacactgggtttccccattcggaaatcgccggttataacggttcatatcaccttaccgacgcttatcgcagattagcacgtccttcatcgcctctgactgccagggcatccaccgtgtacgcttagtcgcttaacctcacaacccgaagatgtttcacttcagagttgcgaaaatttgagagactcacgaacaactttcattgttcagtgtttcaattttcagcttgatccagatttttaaagagcaaatatatcaaacaagacttaacagtctgttttgagatattgaggtcggcgactttcactcacaaaccagcaagtggcgtcccctaggggattcgaacccctgttaccgccgtgaaagggcggtgtcctgggcctctagacgaaggggacacgaaaattgcttatcacgcgttgcgtgatattttcgtgtagggtgagctttcattaatagaaagcgaacggccttattctcttcagcctcactcccaacgcgtaaacgccttgctattcacttttcatcagacaatctgtgtgagcactgcaaagtacgcttctttaaggtaaggaggtgatccaaccgcaggttcccctacggttaccttgttacgacttcaccccagtcatgaatcacaaagtggtaagcgccctcccgaaggttaagctacctacttcttttgcaacccactcccatggtgtgacgggcggtgtgtacaaggcccgggaacgtattcaccgtggcattctgatccacgattactagcgattccgacttcatggagtcgagttgcagactccaatccggactacgacgcactttatgaggtccgcttgctctcgcgaggtcgcttctctttgtatgcgccattgtagcacgtgtgtagccctggtcgtaagggccatgatgacttgacgtcatccccaccttcctccagtttatcactggcagtctcctttgagttcccggccggaccgctggcaacaaaggataagggttgcgctcgttgcgggacttaacccaacatttcacaacacgagctgacgacagccatgcagcacctgtctcacggttcccgaaggcacattctcatctctgaaaacttccgtggatgtcaagaccaggtaaggttcttcgcgttgcatcgaattaaaccacatgctccaccgcttgtgcgggcccccgtcaattcatttgagttttaaccttgcggccgtactccccaggcggtcgacttaacgcgttagctccggaagccacgcctcaagggcacaacctccaagtcgacatcgtttacggcgtggactaccagggtatctaatcctgtttgctccccacgctttcgcacctgagcgtcagtcttcgtccagggggccgccttcgccaccggtattcctccagatctctacgcatttcaccgctacacctggaattctacccccctctacgagactcaagcttgccagtatcagatgcagttcccaggttgagcccggggatttcacatctgacttaacaaaccgcctgcgtgcgctttacgcccagtaattccgattaacgcttgcaccctccgtattaccgcggctgctggcacggagttagccggtgcttcttctgcgggtaacgtcaatgagcaaaggtattaactttactcccttcctccccgctgaaagtactttacaacccgaaggccttcttcatacacgcggcatggctgcatcaggcttgcgcccattgtgcaatattccccactgctgcctcccgtaggagtctggaccgtgtctcagttccagtgtggctggtcatcctctcagaccagctagggatcgtcgccttggtgagccgttaccccaccaacaagctaatcccatctgggcacatccgatggcaagaggcccgaaggtccccctctttggtcttgcgacattatgcggtattagctaccgtttccagtagttatccccctccatcaggcagcttcccagacattactcacccgtccgccactcgtcagcgaagcagcaagctgcttcctgttaccgttcgacttgcatgtgttaggcctgccgccagcgttcaatctgagccatgatcaaactcttcaatttaaaagtttgatgctcaaagaattaaacttcgtaatgaattacgtgttcactcttgagacttggtattcatttttcgtcttgcgacgttaagaatccgtatcttcgagtgcccacacagattgtctgataaattgttaaagagcagtgccgcttcgctttttctcagcggcgcggggtgtgcataatacgccttcccgctacagagtcaagcatttctttgcttttctctgttgagattctcaggagaaccccgccgacccggcggcgtgtttgccgttgttccgtgtcagtggtggcgcattatagggagttattccggcctgacaagcgaaaaatataaaaactttatcgttcgctcacttttcaggcaaaacatcttaaatatagtcttttccgtctaacttatagacaaaaacgagccccgaagggctcgttttatcatttactggacggcgacaatccggtcttcattaacttccaggcgaatcactttacccggaaccaattcaccagacagtatttgctgtgccagcgggttttcgatctgctgctgaattgcacgtttcagaggacgtgcaccatagaccggatcgtaaccgttctcgctcagcagtttcagcgcctcgtcagaaatgtggatttcataaccacgttcttccagacgtttgtacagacgtttcaactgaatctgcgcaatgctggcaatgtgctgttcacccagcggatggaagaccaccacttcatcgatacggttaatgaattccggacggaagttatggcttaccacaccgagcaccagctctttcatgtgcgcataatccagttcaccgaagcgttcctgaatcagatcggaaccgaggttagaggtcataatgacgaccgtattacggaagtcgaccgttctcccttgcccgtcagtcagacgcccatcatccagtacctgcaacagaatgttgaagacatccggatgcgctttttccacttcatccagcaggatgacggaatacggacgacgacgcaccgcttcggtcaggtagccaccttcttcataaccgacatatcccggaggcgcaccaaccaaacgagacacgctgtgtttctccataaactcggacatatcgatacggaccatcgcctcgtcgctatcaaacataaagttcgccagcgccttacaaagctctgttttccccacaccagttgggccgaggaacaggaaactaccaatcgggcgatttggatccgccagccccgcacggctacgacgaatagcgttagataccgcatcaaccgcttcgttctgaccaattacgcgatggtgcagttcttgctccatacgcagcagtttttcgcgctcgctttccatcatgcgagaaaccggaatccccgtccaacgcgccagcacttcagcaatttcggcgtcggtcactttattacgcaacagacgcatagttttgccttcgagctgcgttgcggcttccagttgcttttccagttccgggattttgccgtattgcagttcagacatccgcgccaggtcccccacacggcgagcctgttcaatagcgattttcgcctgttccagttccgctttaatggtctgcgtaccagaaaggcttgccttctctgctttccactcttcttctaactcggagtactgacgttctttgtcgctcagttcttcgttgagcatatccagacgttttttactggcttcatcagactctttcattaacgcctgttgttccagtttgagctggatgatacgacgatcgagtcggtcgagttcttctggtttactgtcaatctgcatacgaatgctggatgctgcttcatcgatcaggtcgatggctttatccggcagctgacggtcagcaatgtagcgatgagacaacgtcgccgctgcaacaattgccgggtcagtaatttgcacatggtggtgcaattcgtaacgttctttcaggccacgcagaatcgcaatggtatcttcaacagaaggctcggcaacaaacactttctggaaacgacgttccagcgcagcatctttttcaatgtactggcgatattcgtcaagcgtcgtggcacctacgcagtgcaattcaccacgcgccagcgccggtttcagcatgtttccggcgtccattgcgccatcggctttacccgcgccgaccatggtatgtaattcgtcgataaataggatgacgttgccttcctgtttggcaagatcgttaagcacgccttttaaacgttcttcaaactcaccgcgatatttcgccccagccaccagcgcgcccatatccagcgccagtacccggcggcctttcaacccttccggcacttcgccgttgataatacgctgcgccagaccttcaacgatggcagttttaccgacgccgggttcaccaatcagtaccgggttatttttagtacgacgttgcagcacctgaatggtacggcgaatttcttcatcacgaccaatcaccggatcgagtttgccctgttcggctcgttcggtaaggtcgatggtatattttttcaaagcctgacgttggtcttcagcaccttgatcgttcacgctttcacctccacgcatttgttcaatcgcttgagtaatgttggcggtggtcgcccctgctgctttcaggatgtcggccagcgtgccgcgagactcaagtgccgccagaacgaacagttcactgctgataaagttatcaccacgtttttgcgccagcttgtcgcaaagattaagaacgcgcaccagatcctgacttggctggacatcaccaccagtaccttcaacctgcggtaaacgatttaatgcctgattgatatctgtgcgcaactggccagcatttatgccagcggatgttaataaaggactaacgctacccccttcctgattcagcagggcgctcattaaatgaagtggttcgataaattggttgtcgtgcccgagtgcaagactttgggcatcggcaagagcaagctggaatttattagtaagacgatccagacgcataactcctcccataacggatcaaagttgctactggagattaaatgaggtcatccctcaattattcaaggttattgaccagattaatgtgaaaagaaaatcacgcgtaccggatcgtcttgattctttaggttatatcagccaaatgaaacttgccatacgaccggtggtcttgtcgcgacgataagagaagaaagtctcattttccgtatatgtacaacggtcgccgccgaaaatttgctcaacacccacgttcgccagacgctgccgggcaagctgataaatatccgccagatacttatcaccatgctgaatgaaagctgcacttgctttagcgtctactgccataaacgcctcgcgaacctccccccccacttcgaacgcgcgtggaccaattgccggccctaaccaggcgagaatattttccggattatcagcaaaacaggaaaccgtctcttccagcacgcctgcgcacagtccacgccagccagcatgagcggcggcgacttccgttcccgctcgattgcaaaacagcacagggaggcagtcggcagtcatcactgcgcaaaccgtgccgggcgtattgctataagaggcatccgcccgtttactggcataaggttcgccagtgagcttaagcacatctttgccgtgtacctgctcaagccagaccggtttagaaggcaaattgcccgcagcaaaaagtcgcttgcgattctcctcaacgtgatccgggttatcgccacaatgggcaccgaggttgagactgtcatacgggggcaagctcacgccgccgatacgagtggagctacaggccgcaacaccttttggctgcggccactgcgggacaatcagcttactcataaccagtccacttcatccttatgttcttcgaaatcggcgcgcatcacctcaatcagctccaccatatcttgtggaataggcgcatgccattccatttcgatgccggagatcgggtgataaagacgcagcatggttgcatgtagcgcctggcggtcaaacttacgcagcgtggagataaatgcttcgctagcaccttttggcggacgcggacggccaccataaaccggatcgcccaccagcggatgagtgatatgggccatatgcacgcggatctggtgcgtacgtccagtttccagacgcaaccgcagacgcgtgtgcacacggaagtgttccatgatgcgatagtgagtcaccgctggtttgcccatcggatgcaccgccatatgggtacgtttggtcgggtggcgactgattggctcgtccaccgtgccacctgcggtcatatgaccaatcgccaccgcttcatactcacgagtaatttcacgccgttgcaaagattcgactaaacgcgtctgagccggaacggtttttgccacaaccatcaggccagtggtgtctttatccagacgatggacgatgcccgcacgcggtacatcggcaatgggtggatagtaatgaagcaacgcattcagtaccgtgccatccgggttacccgcgccaggatgtaccaccaggtcgcgcggtttattaatgataataatgtcttcatcttcatagacgatatccagcgggatatcctgcggttcaaaacgcgcttcttcttcaatctcagcgttgatggcaacctgctcgccacccaatactttttctttcggcttatcacaaactttgccgttaaccagcactcgctggtcgaggatccattcttttattcggctacgactataatccgggaacatttcggccaaagcctgatctaagcgttgaccgagttggttttcggacaccgttgcagtgagctgtactcgttgtgccatatatactgcttcttcgtttatcgttggggttttacggctttgccgtttaatatagtgtgctattgtagctggtcttaaccgggagcaggaacagagaatctcccgtattacattttgaggaaagtcaaaacgtcatgacgcgcatgaaatatctggtggcagccgccacactaagcctgtttttggcgggttgcagcgggagtaaggaagaagtacctgataatccgccaaatgaaatttacgcgactgcacaacaaaagctgcaggacggtaactggagacaggcaataacgcaactggaagcgttagataatcgctatccgtttggtccgtatagccagcaggtgcagctggatctcatctacgcctactataaaaacgccgatttgccgttagcacaggctgccatcgatcgttttattcgccttaacccgacccatccgaatatcgattatgtcatgtacatgcgtggcctgaccaatatggcgctggatgacagtgcgctgcaagggttctttggcgtcgatcgtagcgatcgcgatcctcaacatgcacgagctgcgtttagtgacttttccaaactggtgcgcggctatccgaacagtcagtacaccaccgatgccaccaaacgtctggtattcctgaaagatcgtctggcgaaatatgaatactccgtggccgagtactatacagaacgtggcgcatgggttgccgtcgttaaccgcgtagaaggcatgttgcgcgactacccggatacccaggctacgcgtgatgcgctgccgctgatggaaaatgcataccgtcagatgcagatgaatgcgcaagctgaaaaagtagcgaaaatcatcgccgcaaacagcagcaatacataacagaaacctgaaacacaaaacggcagcccttgagctgccgtttttttattctgtcagttgtgaaactgaagcgatttagtcgctatcgatctcatcaaatatggctcgctttgagatattcctcaagtaaaaaaacatctcttcctgcgatttctcacaaaaaagattcgttgacaaaaagtgacaaaattatgagattttcatcacacattttgacatcaggaacggtatgctgaattcaccaagacgggaagacaagaggtaaaatttatgacaatgaacattaccagcaaacaaatggaaattactccggccatccgccaacatgtcgcagaccgtctcgccaaactggaaaaatggcaaacacatctgattaatccacatatcattctgtccaaagagccacaagggtttgttgctgacgccacaatcaatacacctaacggcgttctggttgccagtggtaaacatgaagatatgtacaccgcaattaacgaattgatcaacaagctggaacggcagctcaataaactgcagcacaaaggcgaagcacgtcgtgccgcaacaagcgtgaaagacgccaacttcgtcgaagaagttgaagaagagtaatcctttatattgagtgtatcgccaacgcgccttcgggcgcgttttttgttgacagcgtgaaaacagtacgggtactgtactaaagtcacttaaggaaacaaacatgaaacacataccgtttttcttcgcattcttttttaccttcccctgaatgggaggcgtttcgtcgtgtgaaacagaatgcgaagacgaacaataaggcctcccaaatcggggggccttttttattgataacaaaaaggcaacactatgacaagcgaaaacccgttactggcgctgcgagagaaaatcagcgcgctggatgaaaaattattagcgttactggcagaacggcgcgaactggccgtcgaggtgggaaaagccaaactgctcagccatcgcccggtacgtgatattgatcgtgaacgcgatttgctggaaagattaattacgctcggtaaagcgcaccatctggacgcccattacattactcgcctgttccagctcatcattgaagattccgtattaactcagcaggctttgctccaacaacatctcaataaaattaatccgcacagtgcacgcatcgcttttctcggccccaaaggttcttattcccatcttgcggcgcgccagtatgctgcccgtcactttgagcaattcattgaaagtggctgcgccaaatttgccgatatttttaatcaggtggaaaccggccaggccgactatgccgtcgtaccgattgaaaataccagctccggtgccataaacgacgtttacgatctgctgcaacataccagcttgagcattgttggcgagatgacgttaactatcgaccattgtttgttggtctccggcactactgatttatccaccatcaatacggtctacagccatccgcagccattccagcaatgcagcaaattccttaatcgttatccgcactggaagattgaatataccgaaagtacgtctgcggcaatggaaaaggttgcacaggcaaaaagtccgcatgttgctgcgttgggaagcgaagctggcggcactttgtacggtttgcaggtactggagcgtattgaagcaaatcagcgacaaaacttcacccgatttgtggtgttggcgcgtaaagccattaacgtgtctgatcaggttccggcgaaaaccacgttgttaatggcgaccgggcaacaagccggtgcgctggttgaagcgttgctggtactgcgcaaccacaatctgattatgacccgtctggaaagtcgcccgattcacggtaatccatgggaagagatgttctatctggatattcaggccaatcttgaaagtgcggaaatgcaaaaagcattgaaagagttaggggaaatcacccgtagtatgaaggtattgggctgttacccaagtgagaacgtagtgcctgttgatccaacctgatgaaaaggtgccggatgatgtgaatcatccggcactggattattactggcgattgtcattcgcctgacgcaataacacgcggctttcactctgaaaacgctgtgcgtaatcgccgaaccagtgctccaccttgcggaaactgtcaataaacgcctgcttatcgccctgctccagcaactcaatcgcctcgccgaaacgcttatagtaacgtttgattaacgccagattacgctcactgctcataatgatgtcggcataaagctgcggatcctgagcaaacagtcgcccgaccatcgccagctcaaggcggtaaatcgggctagagagcgccagaagttgctcaagctgaacattttcttctgccaggtgcagcccgtaagcaaaagtagcaaagtggcgcagtgcctgaataaacgccatattctgatcgtgctcgacggcgctaatacgatgcagccgagcgccccagacctgaatttgctccagaaaccattggtatgcttccggtttacgtccatcacaccagaccacaacttgctttgccaggctaccgctgtccggaccgaacatcgggtgtagccccagcaccggaccatcatgcgccaccagcatggcctgtaatggcccatttttcacacttgccagatcgaccagaatacaatctttcggtaaaggcggtaatttgccaataacttgctcagtaacgtggattggcacactaacaatcaccattccggcatcggcaacaatatcagccgctcgatcccagtcatgttgctccagaatccgcacctgataaccgctgagggtcagcatcttctcgaacaggcgtcccatctgaccgccaccgccgacgataaccaccggacgcagactcggacaaagtgttttaaatcctttgtcgttttcactggagtaagattcacgcatcacccgacgcaaaacatcctcaatcagatctggcggtacacccagagcttccgcctctgcacgacggctggccaacatagatgcctcgcgctccggaacataaataggcagtccaaagcggcttttcacctcgcccacttcagcaaccagttccagacgcttcgctaataaattcagcagcgctttatcgacttcatcaatttgatcgcgtaatgcggtcaattcagcaaccataataaacctcttaagccacgcgagccgtcagctgcccgttcagatcctgatgaatttcacgcagcaaggcatcggtcatttcccagctaatgcaggcatcggttacggatacaccgtatttcatttcactgcgcggttgctcggaagactgattgccctcgtggatattactttcgatcatcagaccaataatactgcgattgccatctttgatttgagcaaccacggattctgccaccgcaggctgacggcgataatctttattggaattaccgtggctgcaatctaccatcagagacgggcgcagtcccgcctgttccatctctttttcacattgcgcaacatccgcagggctatagttcggcgctttaccaccgcgcaggatcacatggccgtccggattcccctgagtttgtagcaacgcaacctgccctgcctggttaatgccaacaaaacggtgcggctgggcggcggcgcgcatagcgttaattgctgttgccagactgccgtcggtgccgtttttaaaaccaaccggcatggaaagcccggaggccatttcacggtgagtttggctttccgttgtacgagcaccaattgcactccagctaaacagatcgcccaggtattgcgggctattcggatctaacgcttccgtcgccagtggcagtcccatattcaccagctcaagcagcaatttacgcgcgatctgcagcccggcttctacatcaaaagagccatccatatggggatcgttaattaaccctttccagccgacagtggtacggggtttttcaaaatagacgcgcattaccagatagaggctatcgctgacctctgcggcaagggctttaaatcgacgagcatattccagagcagtttccggatcatgaatggaacaaggaccacatactaccagcagacgaggatcgcgcccggcgataatatcactaatgcttttacggctgtcagcaatctgggcttcttgttgcaggctcaatggaaaagcggccttcagttgttccggagtcattaaaacctgttcgtcggtaatatgtacgttattcagcgcgtctttttgcatgatggcgatcctgtttatgctcgtttgcgatagttgatcctcagcgaggatgacgtaacgataacacataaagtaaagttttcaatccatatttcgtacatttttatttacacaggcaatttagtcgcgctttcaacccttacctctgtatagataaatttacactccctttgaaaacaatccgctatgctttgaaaaaggagaaagaaatgatgaaaaagtttatcgcccccttgttggctttactggttagcggatgtcagattgatccttatactcacgcgccaaccttgaccagcaccgactggtatgatgtcggtatggaagatgcgataagcggcagcgccataaaagatgacgatgcatttagcgatagtcaggcggatcgcggtctataccttaaaggatatgccgaaggacaaaagaaaacttgccagaccgattttacttatgcccgaggactttccggtaaaagctttcctgccagctgcaacaatgttgaaaatgccagccaactgcatgaagtaggcaaaaaggggctgatgaaaatgccagcacaatacgattaaattaattaaaaccccacaaataaattaaacataagattttactcattgtgttttatttctcacattgatgacggtcgcatgaaaaaatgatattttaatgagcattctgaaaaaatatcgatgcatttcgagcgaagatggtggggatccctgaatgcgtttttctcaccgactgttcttacttctgattctcctgctgacgggagcaccaatactcgctcaggagccttctgacgttgcgaaaaacgtgcgtatgatggtttccggtattgtcagttacacccgctggcctgcgctaagtgggccaccaaagttatgtatctttagttctagtcgttttagtaccgccctacaagagaatgccgcgacatctttgccttatctgcctgtcatcattcacactcaacaagaggcgatgattagtggctgcaatggtttttattttggcaacgagagtccgacattccagatggaattaaccgaacaatatccgagtaaggcgttattattaattgccgaacaaaataccgagtgcattattggtagcgccttttgtctgatcatccacaataatgacgtcagatttgccgtaaacctggatgccttaagccgtagcggtgtaaaggtcaacccggatgtcttaatgctcgcacggaagaaaaatgatggataacgataattctcttaataagcgccccacgtttaaaagagcattacgcaacatcagtatgaccagcatatttatcactatgatgctgatctggttgctgctttccgtgaccagcgtgctgaccctgaaacagtacgcgcaaaaaaacctggcactgacagcagcaacaatgacttacagtctggaagcagctgtcgtttttgccgatggccctgcagcaactgaaacactggcagcgctgggccagcaagggcaatttagtactgcagaagtacgtgataagcagcaaaatattctggcatcctggcattacacccgtaaggatccaggcgatactttcagtaatttcataagccactggctcttccctgcccccatcattcagccgattcgtcacaatggtgaaaccattggcgaagtacgcttaaccgctcgcgacagtagtatcagccattttatctggtttagcctcgccgtactgaccggttgtattctgctggcaagtggcatcgcaattaccctcacccgccatttgcacaatggcctggtagaagcgctgaaaaatatcaccgatgtcgtacatgatgtgcgttccaaccgcaatttttcccgacgagttagcgaagaacgtatcgctgagtttcaccgcttcgctctcgacttcaacagtctgctggatgaaatggaagagtggcagcttcgtttacaggctaaaaatgcgcagcttctacgtaccgcgctacatgacccattaaccgggctggctaaccgcgcagcgtttcgtagcggcatcaacacgttgatgaacaattccgatgcccgaaaaacgagcgcgttactatttcttgatggcgataatttcaaatacatcaatgatacctggggtcatgcgacgggcgatagagtcttgattgaaatcgcaaaacggttagctgaatttggcgggctgcgacataaagcataccgcctgggcggcgatgaattcgctatggtgctctatgatgtacagagcgaatctgaagtgcagcagatatgtagtgcactgacacaaatctttaatctcccgtttgatcttcataatggccatcagaccaccatgacattaagcattggttacgcgatgaccattgagcacgcctctgcggaaaaattacaagagcttgccgatcacaatatgtatcaggccaaacaccagcgtgccgaaaagctggtgagataacaaggatatatcgatatgataaagcacctggtagcacccctggttttcaccagtctaatactgactggctgccagtcccctcagggaaagtttactcctgagcaagtcgccgctatgcaatcttatggatttactgaatccgccggcgactggagcctgggcttaagtgatgccattctgttcgcaaaaaatgactacaaattgctcccggaaagccagcaacagatccaaaccatggcagctaaattggccagcacagggctaacacatgcccgtatggatggacacaccgataactatggtgaagacagttacaacgaaggcttaagtttgaaacgggcgaatgtcgtggccgatgcatgggctatgggtggacaaattccacgcagcaatctcaccacacagggtttaggaaaaaaatatcccatagccagtaacaagaccgcccagggccgcgccgagaaccgccgcgtcgcagtggtgattactaccccttaaaacaccagcaaacagataaaaaagggccagccaattggccagcccttcttaacaggatgtcgcttaagcgaaatcttagttaagacgctctttgatacgagcagccttaccagtacgctcacgcaggtagtacagtttagctttacgaacagcaccacgacgtttgacagaaatgctgtcaactaccggagagtgagtctggaagacacgctcaacgccttcgccgttggaaattttacgaacagtgaatgcagagtgcagaccgcggttacgaatagcgataaccacgccctcgaatgcctgcagacgttttttggaaccttcaacaacccatactttcacttccacggtatcacccggacggaaggaaggtacgtcctgcttcatctgctcttgttcaagttgcttaataatgttgctcataatttaatctcttatcctgggtaaactgatatctcgggggcttacgccatcccatcatgtttatgttgctgttgtgcgtgttccgttttgaactccgccagcaaccttgcttgctcttcagtcagagccaggttttccagaagttcaggtcttctaagccaggtacggcccaggctctgtttcaaacgccagcgacgtatctcggcatggttgccgctcagtaacactggcggaacttccatcccttctaacacctcaggccgcgtatagtgcgggcaatccagcaatccttcagcaaaggaatcttccgttgcgctggcttcatgtcccagtactcccggaataaaccgggaaacggagtcaatcagcgtcattgctggtaactcaccaccactgagaacgtaatcgccgatactccattcttcgtcaatttcggtttggatcacgcgctcatctataccttcgtagcgaccgcacaccagaatcaatttttgattcgttgccagttcgctgacgcccgcttgatcaagcttgcgtccctgtggactcagataaatcacctttgcgccttcacccgccgcggcttttgctgcatgaatggcgtcccgcaagggttgcaccatcattaacatccccggtccgccgccgtaaggacgatcgtccacggtacggtgccggtcatgcgtgaagtcgcgaggactccagctctggatgctcagcaggccatttttaactgcccggccagttaccccgtaatcggtaattgcgcggaacatttcaggaaacaggctaattatgccaatccacatagcgccgtcttttaccgtttatccggtggtttaaaaaccaggatcccaatctacttcgatactacgagtagtgagatcgactttcttgataacctgcccatcgaggaacggtacgagacgttccttgataccaaacgcatctttcaggtttgccttaatgacgagaacgtcattagatccggtttccatcatatcgacgactttaccgagatcgtagccttcagtggttactacctggcagcccatcaggtctttccagtagtagtccccctcttcaagctgaggcagctggctactatccacgacaatttcacaattcgtcagcaggttcgccgcatcacgatcgtcaacgcctttcagcttgatgatcatgtcctgattgtggtgcttccagctttccagctggacttgctgccactgacccgccttctggataaaccagggctgatagtcaaaaatgctttcggcgtcttcggtggaagaaaacactctgagccacccacgaataccgtaagagctacccatttttcccaaaacgatgggatcaacaggtgcttgcgcggtgagttgtttgctcatcatgaccaccgtgacagattaagctgctttgtttacttctttgatcagcgcagcaacgcgatcagaaatagttgcgccctggccaacccagtgagcgatgcgatccagatccaggcgagtgccttcttctttttcgctagcgattgggttgaagaaaccaacgcgctcgatgaagcgaccgttgcgtgcattacggctgtcagcgacaacaacctggtagaacggacgctttttagcgccgtgacgtgctaaacgaatagttaccataacatcctcttgtgtgaataaaacaaccggaccccatcgaggaacggagtccggtgtcatattaaaagcccgaaaattttactcatttttgcgggaattgcaatcaacagttgctaactctgctgtaaaaggccgtcggcggtgcagccagtttggtgccggagtgcgcgcagtcaccggagcgtacacgcagtacgtgaggatgacgagcacatcccggtgccaaaatggcaaacaagccaggccgattagcgaccagggaagcctgggggcatcatacccttcatgcttctcatcatcttcgccattccgcccttcttcattttcttcatcatgcgctgcatgtcgtcgaactgtttcagaagacggttaacgtcctgcacctgcataccgcaaccggcagcaatacggcgtttacggctacctttgatgatttctggcttagcgcgctctttcatcgtcatgctgttgatgatggcttccatacgcaccagcactttatcgtccatctgactcttgacgttatccgggatctgccccatgcccggcagcttgcccatcagactagccatgccgcccatatttttcatctggcgcagctgctcaagaaagtcgttgagatcgaagccgtcaccttttttcagcttgctggctaatttctctgcctgcgcgcggtcaactttgctttcgatatcttcgatcaggctcagtacgtcgcccatgccgagaatacggctcgcgatgcggtccggatggaacggctccagcgcctcagttttctcgccaacaccgaggaacttgatcggtttgccagtgatgtgacgaatagagagcgccgcaccgccgcgggcatcgccgtccactttggtcaacactacgccggtaagcggtaacgcttcattgaatgcttttgccgtattggccgcatcctgaccggtcatggcgtcaaccacaaacagggtttcaaccgggttaatgctcgcatggacttgtttgatctcgtccatcatcgcttcgtcaacgtgcagacgaccagcggtatccaccagcagcacgtcgtagaatttcagtttggcttctttcagcgccgcgttaacgatatctaccggcttctgaccaacatcagaagggaagaaatcaacgcccacctgctctgccagcgtctcaagctgtttgattgccgccgggcgataaacgtcggcagaaaccaccagcactttcttcttgtgcttctcgcgcaggaacttaccgagtttaccaacgctggttgttttaccggcaccttgcaggcccgccatcagtacgaccgcaggcggttgcgcagccaggttcagggtctggttctcttcgcccatcgccgcaaccagttcgttacggactattttgacgaactcctgccccggcgtcaggctcttattaacttcatgaccaaccgctttctcttttacgcgattgataaactcacgcactaccggcagagctacgtccgcctccagcagcgccatgcgcacttcgcgcagcgtatcttttacgttgtcttcagtgaggcgtccacggccactgatattgcgcagcgtgcggctcaaacgatcggttaaattatcaaacattgtctctcgcctggggtggaaacggttggccgcaatcgcgacacatcatcagtattttgccgcagtataacatgaaggcgtctttgttgttatgcaacggttggagcagcgtagtcctgacgctatactgcttctctttcttattgctcaaactgtcgacatcactatgcccgtttttgctctgctcgcgcttgtcgcctactccgtcagtcttgcgctgattgttcccggtctgctgcaaaaaaacggcggctggcggcgcatggctattatttctgcggtcattgcgctggtctgccacgcaatcgctctggaagcccgcatcctgcccgacggtgatagcggacaaaacctcagcctgctgaacgttggtagtttggtcagtttgatgatctgtacggtaatgaccattgtggcttctcgcaatcgtggctggctgctgctacccattgtctatgcctttgcgcttatcaacctggcgctggcaaccttcatgcccaatgaatacatcacccatctggaagctacgcctgggatgctggtgcacattggcttaagcctcttttcctatgccacgctaattatcgccgccctgtacgcgctgcaactggcgtggattgattaccaactgaagaacaagaagctggcgtttaaccaggaaatgccgccattgatgagtatcgagcgtaaaatgttccacatcacgcagattggcgtggtgctgctaacgctcacgctttgcactggcctgttctacatgcacaacttatttagcatggaaaatatcgacaaggctgtgctctctatcgtggcgtggtttgtctatattgtgctgctgtggggacattatcatgaaggatggcgtggacgccgcgtcgtctggtttaacgttgcgggcgcggtaattctgacactggcctacttcggcagccgaattgtccagcagttaatcagctaaacccagaaaaggagtttcccctggaacacatttctactactacgttgatcattattctgatcatcatggtggtcatttcagcctatttttccgggtccgaaaccggaatgatgaccctcaaccgctatcgtctgcgacatatggcgaaacagggtaatcgcagcgccaaacgcgtcgaaaaattgctgcgtaagccagaccgcctgataagcctggtgttaatcggcaataacctggtcaatattcttgcctccgcgctcggcactattgttgggatgcgtttgtacggcgatgcgggcgtggcaattgcgactggtgtgctgacttttgtcgtactggtatttgctgaggtattgccgaaaaccattgccgcgctgtacccggaaaaagtcgcttatccgagtagttttctgctggctccgctgcaaattttgatgatgccgctggtctggttgctgaatgctatcacccgtatgctgatgcgcatgatgggtatcaaaaccgatatcgtggttagcggctctttgagcaaagaagagttgcgcactatcgtgcacgaaagtcgcagtcaaatttcccgtcgcaatcaggatatgctgctgagcgtgctcgatctggaaaaaatgaccgttgatgacatcatggtgccgcgcagtgaaattatcggtattgatatcaacgatgactggaaaagcattctgcgccaactctcccacagtcctcacgggcgcatcgtgctctaccgtgatagcctggacgacgccatcagtatgctgcgagtacgtgaagcctggcggttgatgagcgagaaaaaagagttcaccaaagaaaccatgctgcgcgccgcggacgagatctattttgtgccggaaggtacgccgctcagcacgcagttggtaaagtttcagcgcaacaaaaagaaagtcggcctggtcgtcaacgagtatggagacattcaggggctggtgacggttgaagatattctggaagagattgtcggcgatttcactacgagcatgagcccaacacttgccgaagaggtcacgccgcaaaacgacggtagcgtgattatcgatggcaccgccaacgtgcgggaaatcaacaaagcctttaactggcatctaccggaagatgatgcccgcacggttaatggcgtcattcttgaggcactggaagagatccctgtcgcaggcacccgcgtgcgtattggcgagtacgatatcgatattctcgacgtacaggacaatatgattaagcaggtaaaagtttttcctgtgaaaccgctgcgcgagagtgtggcggagtaacgaaaacggcccggcattcgcatgcagggccgtgaattattacgaaagcagaaattaagcttttgctttcgctacagtaaccatcgccgcacgaatcgtacgaccattcagcgtataacccttctgcataatgcccagtacgttacctggcgcaacgtcatcagattccaccattgcgatggcctgatgcacattcgggtccagtgggacgttagtttcggcgatcacttcaacgccaaacttacgcacaacatccagcatgctcttcagcgtcagctcaatgccttcaaccatcgcagacatatccgggttagctttatcagccacttccagcgcacgatccaggctatcaatcaccggcagcaattcgttgatgaatttctccagcgcgaatttgtgggctttttcaatatccagttcagtacgacgacgcaggttttccatttcggcttttacacgcaaaatgccgtcacgttcacgggtctgggcttcagccagctgagcttcgagattcgcaactttttcatcgcgcggatccacctgctcagcagaagcttctggctcaactgcctcaatctcttcgtgctgatccatgataatttcttccggggcttgcccctcaggcgttttctgttctttactactcatgaatttctccgcgtttttttcgcattcatctcgctaacttcgcttattatggggatcagtttcagggtttcaagggaagcactcacattgtcatcaatcttcgcaacaaggacctcggaaaaatgaataatcatttcaagtgtattggcattgtgggacacccacggcaccccactgcactgacaacacatgaaatgctctaccgctggctgtgcacaaaaggttacgaggtcatcgttgagcaacaaatcgctcacgaactgcaactgaagaatgtgaaaactggcacgctcgcggagattgggcaactagctgatctcgcggtagtcgttggtggcgacggtaatatgctgggcgcggcacgcacactcgcccgttacgatattaaagttattggaatcaaccgtggcaacctgggtttcctgactgaccttgaccccgataacgcccagcaacagttagccgatgtgctggaaggccactacatcagcgagaaacgttttttgctggaagcgcaagtctgtcagcaagattgccagaaacgcatcagcaccgcgataaatgaagtggtgcttcatccaggcaaagtggcgcatatgattgagttcgaagtgtatatcgacgagatctttgcgttttctcagcgatctgatggactaattattagcacgccaacaggctccaccgcctattccctctctgcaggcggtcctattctgaccccctctctggatgcgattaccctggtgcccatgttcccgcatacgttgagtgcacgaccactggtcataaacagcagcagcacgatccgtctgcgttttagccatcgccgtaacgacctggaaatcagttgcgacagccagatagcactgccgattcaggaaggtgaagatgtcctgattcgtcgctgtgattaccatctgaatctgattcatccgaaagattacagttatttcaacacattaagcaccaagctcggctggagtaaaaaattattctaattttacgccagcctctttactgtatataaaaccagtttatactgtacacaataacagtaatggtttttcatacaggaaaacgactatgttggcacaactgaccatcagcaactttgctatcgttcgtgagcttgagattgattttcatagcggcatgaccgtaataactggcgagaccggcgcgggtaaatctattgcaatagatgccctcggtctttgtctcggtggtcgcgctgaagccgacatggtgcgtaccggcgctgctcgcgctgacctgtgcgcccgtttttctctgaaagatacgccagcggctctgcgctggctggaagaaaaccagcttgaagacgggcatgaatgtttgcttcgtcgcgtgatcagcagcgatggtcgctcccgtggtttcatcaacggtacagctgttcctctgagtcaactgcgcgaactgggtcagttgctgattcagatccatggtcagcacgctcatcaattactcaccaaacctgagcaccaaaaattcctgcttgatggctatgccaatgaaacctctctactgcaggaaatgaccgcacgttatcagttgtggcatcaaagctgccgtgacctcgcgcatcatcaacagttaagtcaggaacgcgccgcccgtgcggaactgctgcaataccaattaaaagaacttaacgaatttaatccgcagcccggagagtttgaacaaatcgacgaagagtacaaacgtctggcgaacagcggtcaattgctgaccaccagccagaatgcattggcattaatggccgacggtgaagacgcaaacctgcaaagtcagctttacacggctaaacaactggtgagcgaattgattggcatggacagcaaactgtccggcgtacttgatatgctggaagaagctaccatccagattgctgaagccagcgatgaactgcgccactactgcgatcgtctggatctcgatcccaaccgactatttgaacttgaacagcgcatcagtaaacagattagcctggcacgtaaacatcacgtcagccctgaggcattgccacagtattaccagagcctactggaagaacagcagcaactggacgatcaggccgacagtcaagaaacgcttgcgctggcggtaacgaaacatcatcagcaggcactggaaatcgcgcgcgcattacaccaacaacgccagcaatatgcagaagaacttgcacagctgatcaccgacagtatgcatgcgctcagtatgccgcatgggcagtttacgatcgatgttaaatttgacgagcatcacctgggcgctgacggtgccgatcgtattgagtttcgggtaaccaccaacccaggtcagccaatgcagcctattgccaaagtcgcatccggtggtgaattgtcccgcatcgcactggcaatccaggtcatcacggcgcgtaaaatggaaaccccggcactgatttttgatgaagtggatgtagggattagcggtccaacagcggcagttgtcggcaaactgctgcgtcaactcggcgaaagtactcaggtgatgtgtgttacccacctgccacaagtcgcgggatgtggtcatcaacactattttgtcagcaaagaaaccgatggtgcgatgacagaaacgcatatgcaatccctgaataaaaaagcgcggttacaagagctggcgcgcctgcttggtggcagtgaagtcacacgtaatacactggcgaatgcgaaagaactgcttgcagcgtaaacttttttcctgcttcacggtcagagtaaacagcaaaacgccgtaagaccggaaagcaaaaggttttaaagtgatgaaaggtctattatcatcggcatattacagatgagccacgtactgctcgggcccgaaaaggaatcaaatcactatgcgctgtaaaacgctgactgctgcagcagcagtactattgatgttgaccgcaggctgttccactctggagcgagtggtttaccgtcctgacatcaaccaggggaactatctgaccgctaacgacgtatccaaaatacgtgttggcatgacgcaacaacaagttgcgtacgcattgggtacaccgctgatgtccgatccatttggtacgaatacctggttctatgtcttccgccagcaaccaggtcatgaaggtgtaactcagcaaacgctgacgctgacctttaacagtagcggtgtgttgaccaatattgataacaaacctgcgctgagtggtaactaataataaagttgctctcaaagacgttaaaaaaggtgctcaatgagcaccttttttctgtctgttatttattcgcacttttttctgctcgttgcctgcgaagctctttcggatcggcaatgagagggcgataaatctccacccgatcgccatcatgcacactatcgcttagttttgccggacggctgtaaatgccgactttgtttttagttaaatcgatatcggtacgcaattccagcaagccactggcgcgaatagcttcttcaaccgtcgcgccctcctgcagcgtcactcgctgcaggtactgcttctcaggtagcgcataagccacctcaacggcaattttacctggcactgtaaacctctttcgcacgaaccgtaaaagcctggaccatattagccgccagctctttaaacacgcgaccaaaggcgagttcaatcaacttattggtaaactcaaagtcgagatgaaactcgatacgacacgcctcctggctcagcggcgtaaacttccatccaccaatcaatttcttgaacggcccatccaccagattcataagaatactttggttactggtcaactggttgcgggtagtaaacgttttgctgatcccagccttagagacatctaccgccgcagtcatctgcccaggagtggactccagaatccgacttccggtacaacccggcaaaaactgaggataagactgaacgtcattcactaactgatacatttgctccgcgctgtagggtaccagtgcggtccggctaatctgaggcataacaatttccatcaacaaaaatccaacaaataatatcatttatcctgctgtaaaaaaaacgctatcccggcgctgggtaacatcgggttcatgctaagatagagccttgtcccccgcaggattgatatggggtgttttcgatttcagattaccgatgattcacgacgcttatgacgaagaaaaaagcacataaacctggtagtgcgaccatcgcgcttaacaagcgcgcccgtcacgaatactttatcgaagaagagttcgaagcgggacttgccctgcaaggctgggaagttaaatccctgcgcgcaggaaaagccaatatcagcgacagctacgtccttctgcgtgacggagaggcatttctgtttggcgctaacatcacgccaatggccgtggcctccacgcatgtggtgtgcgatcctacccgtacccgcaagttacttctcaaccagcgcgaactggacagtttgtacggtcgcgtcaatcgagaaggctataccgtagtggcgctctccctgtactggaaaaatgcctggtgcaaagtgaaaatcggcgtcgccaaaggtaagaaacagcacgataaacgtagtgatatcaaagagcgcgaatggcaggtggataaagcacgtatcatgaaaaacgcccaccgttaaacctgcactccaattattgaccagttcctcaccgcgcctccctctccggcggcgcgaatgaacatcttattggctatcacatccgacacaaatgttgccatcccattgcttaatcgaataaaaatcaggctacatgggtgctaaatctttaacgataacgccattgaggctggtcatggcgctcataaatctggtatacttacctttacacattggggctgattctggattcgacgggatttgcgaaacccaaggtgcatgccgaggggcggttggcctcgtaaaaagccgcaaaaaatagtcgcaaacgacgaaaactacgctttagcagcttaataacctgcttagagccctctctccctagcctccgctcttaggacggggatcaagagaggtcaaacccaaaagagatcgcgtggaagccctgcctggggttgaagcgttaaaacttaatcaggctagtttgttagtggcgtgtccgtccgcagctggcaagcgaatgtaaagactgactaagcatgtagtaccgaggatgtaggaatttcggacgcgggttcaactcccgccagctccaccaaaattctccatcggtgattaccagagtcatccgatgaagtcctaagagcccgcacggcgcaagccctgcgggcttttttgtgccctcaatttgtcccgcgaagtccgaagagaactaattaaatccgaaccttttaggcccattgataggcccaacgaaaagctctattgtttacgttgggctaaacgcagggagactccccacctttgaaaacaggatgtagcgatgaaacttaacgacagtaacttattccgccagcaggcgttgattaacggggaatggctggacgccaacaatggtgaagccatcgacgtcaccaatccggcgaacggcgacaagctgggtagcgtgccgaaaatgggcgcggatgaaacccgcgccgctatcgacgccgccaaccgcgccctgcccgcctggcgcgcgctcaccgccaaagaacgcgccaccattctgcgcaactggttcaatttgatgatggagcatcaggacgatttagcgcgcctgatgaccctcgaacagggtaaaccactggccgaagcgaaaggcgaaatcagctacgccgcctcctttattgagtggtttgccgaagaaggcaaacgcatttatggcgacaccattcctggtcatcaggccgataaacgcctgattgttatcaagcagccgattggcgtcaccgcggctatcacgccgtggaacttcccggcggcgatgattacccgcaaagccggtccggcgctggcagcaggctgcaccatggtgctgaagcccgccagtcagacgccgttctctgcgctggcgctggcggagctggcgatccgcgcgggcgttccggctggggtatttaacgtggtcaccggtagcgcgggcgcggtcggtaacgaactgaccagtaacccgctggtgcgcaaactgagctttaccggtagcaccgaaattggccgccagttaatggaacagtgcgcgaaagacatcaagaaagtgagcctggagctgggcggtaacgcgccgtttatcgtctttgacgatgccgacctcgacaaagccgtggaaggcgcgctggccagcaaattccgcaacgccgggcaaacctgcgtctgcgccaaccgcctgtatgtgcaggacggcgtgtatgaccgttttgccgaaaaattgcagcaggcagtgagcaaactgcacatcggcgacgggctggataacggcgtcaccatcgggccgctgatcgatgaaaaagcggtagcaaaagtggaagagcatattgccgatgcgctggagaaaggcgcgcgcgtggtttgcggcggtaaagcgcacgaacgcggcggcaacttcttccagccgaccattctggtggacgttccggccaacgccaaagtgagcaaagaagagacgttcggccccctcgccccgctgttccgctttaaagatgaagctgatgtgattgcgcaagccaatgacaccgagtttggccttgccgcctatttctacgcccgtgatttaagccgcgtcttccgcgtgggcgaagcgctggagtacggcatcgtcggcatcaataccggcattatttccaatgaagtggccccgttcggcggcatcaaagccagcggtctgggtcgtgaaggtagcaagtatggcatcgaagattacttagaaatcaaatatatgtgcatcggtctttaactggagaatgcgaatgaacagcaataaagagttaatgcagcgccgcagtcaggcgattccccgtggcgttgggcaaattcacccgattttcgctgaccgcgcggaaaactgccgggtgtgggacgttgaaggccgtgagtatcttgatttcgcgggcgggattgcggtgctcaataccgggcacctgcatccgaaggtggtggccgcggtggaagcgcagttgaaaaaactgagccacacctgcttccaggtgctggcttacgagccgtatctggagctgtgcgagattatgaatcagaaggtgccgggcgatttcgccaagaaaacgctgctggttacgaccggttccgaagcggtggaaaacgcggtaaaaatcgcccgcgccgccaccaaacgtagcggcaccatcgcttttagcggcgcgtatcacgggcgcacgcattacacgctggcgctgaccggcaaggtgaatccgtactctgcgggcatggggctgatgccgggtcatgtttatcgcgcgctttatccttgcccgctgcacggcataagcgaggatgacgctatcgccagcatccaccggatcttcaaaaatgatgccgcgccggaagatatcgccgccatcgtgattgagccggttcagggcgaaggcggtttctacgccagcagcccagcctttatgcagcgtttacgcgctctgtgtgacgagcacgggatcatgctgattgccgatgaagtgcagagcggcgcggggcgtaccggcacgctgtttgcgatggagcagatgggcgttgcgccggatcttaccacctttgcgaaaagcatcgcgggcggcttcccgctggcgggcgtcaccgggcgcgcggaagtaatggatgccgtcgctccaggcggtctgggcggcacctatgcgggtaacccgattgcctgcgtggctgcgctggaagtgttgaaggtgtttgagcaggaaaatctgctgcaaaaagccaacgatctggggcagaagttgaaagacggattgctggcgatagccgaaaaacacccggagatcggcgacgtacgcgggctgggggcgatgatcgccattgagctgtttgaagacggcgatcacaacaagccggacgccaaactcaccgccgagatcgtggctcgcgcccgcgataaaggcctgattcttctctcctgcggcccgtattacaacgtgctgcgcatccttgtaccgctcaccattgaagacgctcagatccgtcagggtctggagatcatcagccagtgttttgatgaggcgaagcagtaacgccgctcctatgccggaggcgacgctgcgcgtcttgtccggcctacggggatccaggtcggataaggcgtttacgccgcatccgacaatctgtacgtgaacaggaagaaatctatgttggccgggtaaggcggagccgctctccggcaaaaagaatcaataacaattatacgcgtgacccggcgcgggaaatgtcggggcgctctcccaagtgacacactttcgagaggattcaggatggggcaaagtagccaaccacatgagttaggcggcgggctgaagagtcgccacgtcaccatgttgtctattgccggtgttatcggcgcaagtctgtttgtcggttccagcgtcgccatcgccgaagcgggcccggcggtattactggcctatctgttcgccgggctactggtggttatgattatgcggatgttggcggaaatggcggttgccacgcccgataccggtagcttttccacctatgccgataaagccattggtcgctgggcgggctataccatcggctggttgtactggtggttttgggtactggttatcccgctggaagccaacatcgccgccatgatcctgcacagttgggttccaggcattcccatctggttattttccctcgtcattaccctcgccttaactggcagtaacttattaagcgttaaaaactacggcgaatttgagttctggctggcgctgtgcaaagtcatcgctatcctggcctttattttccttggtgcagtcgcaattagcggtttttacccgtatgccgaagtgagcgggatcagtagattgtgggatagcggcggctttatgcccaacggtttcggtgcggtattaagcgcgatgttgatcaccatgttcagctttatgggcgcagaaattgtcaccattgccgccgcggaatccgacacgccggaaaaacatattgtccgcgccaccaacagcgttatctggcgtatttctatcttctatttatgttctatttttgtcgtcgtggcattaattccgtggaatatgcccggactaaaagccgtcggttcttatcgcagcgtactggaattgctcaatattccccatgcgaaattaatcatggactgcgtgatattactttccgtaaccagttgcctgaacagcgcgctgtataccgcgagtaggatgctctactccttaagtcgtcgcggtgatgctcccgcggtaatgggtaaaatcaaccgcagtaaaaccccgtacgtggcggtgttactctccaccggcgcggcattcttaacggtggtggtgaactattacgcgcctgcgaaggtatttaaatttctgatcgacagctccggcgctatcgccctgctggtttatttagtcatcgccgttagtcagttgcggatgcgcaaaattctgcgagcagaaggaagcgaaattcgcttgcgaatgtggctttatccgtggctcacctggctagtcatcggctttattacctttgtgttggtagtgatgctattccgtccggcgcaacagttagaagtgatctccaccggcttattagcgatagggattatctgtaccgtgccaattatggctcgctggaaaaagctggtattgtggcaaaaaacacccgttcataatacgcgctgatcatgatcaggagtcacaccatgaccattacgtctctggatggctatcgctggctgaagaacgatattattcgcggtaattttcaaccggatgaaaaattacgaatgagtttgctgacaagccgttatgcacttggcgttgggccgttacgggaagctcttagccaactggtggcggaacggctggtcacggtggtgaatcaaaaagggtatcgggtggcgtctatgagtgagcaggagctgctcgatattttcgacgcccgcgccaatatggaagcgatgttagtgagtctggcgattgcccgcggtggcgatgagtgggaggcagacgttctcgcaaaagcgcatctgctgagtaagcttgaggcctgtgacgccagcgagaaaatgcttgatgagtgggatctgcgtcatcaggcgtttcatacggcaattgtggcgggctgtggttctcactatttgctgcaaatgcgtgaacggttgtttgatctggcggcgcgttatcgatttatctggctgcggcgaacggtgcttagcgtggaaatgctggaggataaacacgatcagcaccagaccctgactgcggcggtactggcgcgagataccgcgcgcgccagtgagttaatgcgccagcatttactgacgccaattcccattatccagcaggcgatggctggcaattaattactcttccggaatacgcaacacttgccccggataaattttatccgggctttttagcatcggtttattcgcttcgaagattttattgtacagattagcgttaccgtagacctgtttggaaatggcactcagagtgtcgccagacttaacggtataaaactggctggcagtggctggtgtcgccgttttcacctgatcatcgacactggcaataccggaaatattccccaccgcaacaaggattttctccttcgcctcctgactcaggccgtcaccagtgaccgtcgctttgccgtcggcaatttgaatattcactttatcggcatccggtataccggttttgttcagatgctcctgcaccttcttcgcctgatcgtctttatcgtgctgacctgtaaccgcgtcccagagtttttctccggcatctttcacaaaattgaacagacccatagctacctcattcgttaacggaaacactcagaaagtgtagcagaggaacgcggcgcgttaacgccgcggggatgagcacaggtttaatcgcgggtttgcacccagaacgcgtgaatcaaaccggggatatacccaagcagtgtcaacagaatattaataatgaacgcccaaccgaaccctttaccgagcagcacgccgagcggcggcagaatgatggtgatgacgattctccagaaacccatatgtactccctataagaaaattactcattgtttaaaaagagattttatctcttaagcgtagtaattttagcggagcctgccagtttcagcttacgcttttactctcatttacgctgctgaggctggtatatgttgcatttttagtttagagtttacttaatttagaaaatacttaaataaatatgactgaactcgcgcaattacaggccagtgccgaacaggcagcggccttattgaaagcaatgagccaccctaaacgattgctgattctgtgcatgcttagcggttcccccggcaccagcgcgggagagctgacgcgcattaccggactgagtgcctctgcgacaagtcagcatctcgctcgtatgcgggacgaagggcttatcgacagccaacgggatgcccaacgcattctatattccattaaaaatgaggcggtaaatgccattatcgccaccctgaaaaatgtctattgtccgtaaggagtcactatggctttgacaaccattagcccgcatgatgcacaagaattaatcgcacgcggcgcaaagttaatcgatattcgtgatgctgatgaatatcttcgtgaacatattcctgaagcagatctggctccattatccgtgctggaacagagtggtcttccggctaaattacgtcacgagcaaattatattccactgccaggcaggtaaacgcaccagtaataatgccgataaattagcagcgattgccgcccccgcagaaatctttttactcgaagatgggattgatggctggaaaaaagcaggattgccagtagcggtaaataaatctcaacccttgccgttaatgcgccaggtgcagatcgctgcgggtggtttaatattaatcggcgttgtactgggttataccgtaaatagcggtttcttcttattaagtggctttgttggtgccgggttactgtttgcaggaatcagcggtttttgtggaatggcaaggttgttagataagatgccgtggaaccaacgagcttgagaagcgacgccggacgcgccctagcagcgacatccggcctcagtaattagatcaggaaatcgtcgagagatttaccttctgccagcgcctgagcaattggcttcggtgtacggccctgaccggtccaggttttagtttcaccgttaacatcggtgaatttatatttcgccggacgcggctggcgttttttaccagcgcgtggtgcagcagcagagctattacccaataactcttccgggttaattccgtcagctttcatcagctccagccaggtgctaattttttcctggcgctctgccagttcacgctgctgctgttcttcttcttcacgtctttctttagtgacaaccctgaatttttcgagcatttcttcaagaacgtcaatggagaattcgcgagccatcgcacggagggtgcgaatgttatttaaactttgtaacattacggacataataaagaaaaccttttaacgccaaaacaaaaaaagtatttcgtcgcgtagtgtaagcgatcacttattatatttccacaaaatttaatctatttacagtcctgcgcgagattatttcagctgttattttctgaaactctcagaataatttcaagattatatattagccattttgatgagtaatttagattattggtgaacagagcggcgctctctgctcgctaattccgcaagcctgacaaaatcaaagtgaataaaaatgcaatataacagaataaaagaaaacatccatcactggtgctttctgctgttaatgtacattgtctggcataaaaaatgctgaaaatgacccagctactacatacaccgaattctctacgcttatagcgttacctcacccccaaactttcattagtgatattaaaggtaaggccatatctaattgatttaattaaaaataaatcatatcggcatgtaaaaatccacaatgtacaaaaaacgagccgttacggaatattttatctacaaaaactgactaaataaaaatttttcactaattgattagtcatagccagcgatatacgctatgcgaaaatgcagatggcaatgagatccactgctttcatctccattaacatcccattacgcttttattaaggagcattagcatgttcagtccgcagagtcgcttgcgtcatgcagttgcagatacgttcgcgatggttgtttactgttctgtcgtgaacatgtgtattgaagttttcctctccggaatgagcttcgaacagtctttttattccagattggtagcgattccggtgaacatcttaattgcatggccatacggtatgtaccgtgatctgtttatgcgcgcggcacgcaaagttagcccgagcggctggataaaaaatctggcggatatcctggcttatgtgacgttccagagtccggtgtatgtggcgatcttgttagtggtgggcgcagactggcatcagattatggcggcggtcagtagtaacatcgttgttagcatgttgatgggggcggtttatggctacttcctcgattattgccgccgactgtttaaagtcagccgttaccagcaggtaaaagcctgactcttcttttcgcgactggcatcgccagtcgcgtctttaactggcttcgccaaataaaccattcaaataacgttcaagcgcaacacggctactaaagccatgcgggataccgtaatgctcgtgtcgctcgcctgctaaatagagcggaaattgctggtaatgatcgcaagttttaatatcggaagcgggttcagccagtgtgctactgcgttcttttaatgttggatgaattaccagagcggtacgtcccattcgcgcttcgcgattaacatagacataattttccccacggcggtaaccatacgctttctgggttaccacatcgacagtaaaaccgactttttcaagtacgcgcgccacctcgtctggtcgtaaatacatatttgatcctcgttattatcaaccgcgggcctaccttacctgattgcgcattcacaacgctttcagaaaagtccataaagccgcgatgaacctcagttaagaaaattatggtctacactgaaaattacatcgaattctaatgggggatcatatgtttaaccgaccgaaccgcaacgacgttgatgatggcgtgcaggatatccagaatgatgtcaatcaattagctgacagcctcgaatctgtattgaagtcctggggcagcgacgccaaaggggaagctgaagccgcacgcagtaaagctcaggcattgctgaaagaaaccagggcgcgaatgcatggtcgtactcgcgtccagcaagccgcgcgcgatgccgttggctgcgcggattcttttgttcgtgaaagaccctggtgtagcgtgggtacagcagctgcggtaggtatttttatcggcgcactgttaagcatgcgcaaaagctaatgcaaaaatgataataaatacgcgtctttgaccccgaagcctgtcttcggggtttctttttgcctggtgaatcacaaaaatccccctaccccgtcacgctcatatccagggtaatttcgaccactatttgctatatattgtgtggttgaatcttttttcaactacatctagtatctctgtatcaacagagagacaacccgacgcgtatcatcgcgccgtatcttcattttaaacggaaatacgaatcatgcgcattactatttacactcgtaacgattgcgttcagtgccacgccaccaaacgggcgatggaaaaccggggctttgattttgaaatgattaatgtcgatcgcgttcctgaagcggcagaagcgttgcgtgctcagggctttcgtcagttgccggtagtgattgctggcgatcttagctggtctggtttccgtccggacatgattaaccgtctgcatccagcgccacacgcggccagtgcatgagccagctcgtctacttctccagcagctccgaaaacacgcagcgttttatcgaacgtttaggtctgcccgcggtgcgcatcccgctcaatgagcgggaacggattcaggtagacgagccttacatcctgatcgtgccctcttacggcggcggcggtacggctggcgcggtgccacgacaggtaattcgctttttaaacgacgagcacaaccgggcgttgcttcgcggcgttattgcttctggtaatcgcaactttggtgaggcgtatggccgcgccggagatgtgattgcccggaaatgcggcgtgccgtggctgtaccgttttgaactcatgggtacgcaaagcgatatcgaaaacgttcgtaaaggagtaaccgaattttggcaacgacaaccgcagaatgcctgacgcaggaaacgatggattaccacgcgctgaatgcgatgcttaacctctacgatagcgcaggtcgcattcagttcgataaagaccgccaggccgttgacgcctttattgcgacgcatgtgcgtccgaacagtgtgaccttcagtagccagcagcagcgcctgaactggctggtcaacgaaggttactatgatgaaagcgttcttaatcgctactctcgcgactttgtcattacgctgtttacccacgcacacaccagcggttttcgtttccagacattcctcggggcatggaagttttacaccagctatacgttgaagacattcgacggtaaacgttatctggaagattttgccgatcgagtaacgatggtggcgctgacgctggcacaaggcgatgagacgctggcgttgcaactgaccgatgaaatgctgagtggacgctttcagccagccacgccaacattcctcaactgcggtaagcagcagcgcggcgaactggtttcctgttttttgctgcgtattgaagacaatatggagagcattggtcgggcggtaaattccgcactgcagctgagcaaacgcggcggcggcgtagcatttttgctgagcaatctgcgagaagcgggcgcgccaattaaacgtattgaaaatcaatcttctggcgtaattccggtgatgaaaatgctggaagacgcattttcctatgccaaccaactcggcgctcgtcagggggctggtgcagtctatttacatgctcatcatcccgatattctgcgttttctcgacacgaaacgggaaaatgccgacgaaaaaatccgcattaaaacactgagccttggcgtggtgatcccggatatcactttccatctggcaaaagagaatgcgcagatggcgctgtttagcccttatgacgtagagcgagtttatggcaagccgtttgccgatgtggccatcagccaacactatgacgaactggttgccgatgaacgcattcgcaaaaaatacctcaacgcccgtgatttcttccagcgactggcagaaatccagtttgagtccggctatccctacatcatgtatgaagacacggtaaaccgtgctaaccctatcgccgggcgcataaatatgagtaatctctgcagtgaaattttgcaggttaacagcgccagtgagtatgacgagaatctcgactatacccgcacaggccatgatatttcctgcaatttaggtagcttgaatattgcgcacaccatggattcccccgattttgcccgcacggtagagactgccgtgcgcggtttaacggcagtaagtgatatgagtcatatccgcagcgtgccgtccatcgaagccggaaatgccgccagccacgccatcggactggggcagatgaatttacacggctatctggcgcgagaaggcatcgcttatggtagcccggaagcactggatttcaccaatctctatttctatgccatcacctggcatgcactgcgtaccagcatgttgctggcacgcgaacgcggtgaaaccttcgccgggttcaaacagagtcgctatgccagtggtgaatattttagccaatatctgcaagggaactggcagccgaaaacggcgaaagttggcgaactgtttacccgtagcggtattacgttacctacccgtgagatgtgggcgcagctgcgcgacgacgtgatgcgctacggcatatacaaccagaatcttcaggcggtgccgccaaccggttctatctcttatatcaaccatgctacgagcagtattcatccgattgtggcgaaagtagagatacgcaaagagggcaaaacaggacgcgtttactaccctgccccgtttatgactaacgagaatctggcgctgtatcaggacgcttacgaaattggcgcagaaaagatcatcgacacctacgcggaagcgactcgccatgtcgatcaggggctgagcctgacgctttttttccccgataccgccaccactcgcgatatcaacaaagcgcagatttacgcctggcgcaagggtatcaaaacgctctattacatccgcctgcgtcagatggcgctggaaggcactgaaattgaaggctgcgtctcctgtgcactttaaggaatatctatgaaactcagtcgtatcagcgccatcaactggaacaagatatctgacgataaagatctggaggtgtggaatcgcctgaccagcaatttctggctaccagaaaaggtgccgctgagcaacgatattcctgcctggcagacattaactgtcgtagaacaacaactgacgatgcgcgtttttactggcctgacgctgctcgacacgctgcaaaatgttatcggcgcgccttctctgatgcccgatgcactcacgcctcatgaagaagcggtattaagcaatatcagctttatggaagcggttcatgcccgctcttacagtagcattttcagcacgctatgccagaccaaagatgtcgatgccgcctacgcctggagtgaagaaaacgcaccgttgcagcgaaaagctcagattattcagcaacattatcgcggtgatgatccgctgaaaaagaaaatcgccagtgtgtttcttgaatcttttttgttctattccggtttctggctgccgatgtatttttccagccgcggaaagctgaccaataccgcggacctgatccgtctgattatccgcgatgaagcagtccacggttactacataggctataaatatcagaaaaacatggaaaagatatctctgggacaacgtgaagagttgaagagtttcgccttcgatttgttgctggaactctacgacaacgagttgcaatacaccgatgagctgtacgccgaaaccccgtgggctgacgatgtgaaagcgtttctctgttacaacgccaataaggctttgatgaatctgggctacgaaccgttatttcccgcagaaatggcggaagtgaatccggcaatcctcgccgcgcttagcccgaatgccgatgaaaatcacgatttcttttccggtagtggctcctcttatgtgatggggaaagcggttgaaacagaagatgaagactggaatttctgagggtgttattttcaaaaatatcactacccgcagcagggaaataattcccgccaaatagctttttatcacgcaaataatttgtggtgatctacactgatactctgttgcattattcgcctgaaaccacaatattcaggcgttttttcgctatctttgacaaaaaatatcaactttctcgatttgctctcagcccttatatcacgggaaattccggcgatttgctcgcatcaatattcatgccacatttgccatcaggggttgcctcagattctcagtatgttagggtagaaaaaagtgactatttccattgggtaatatatcgacatagacaaataaaggaatctttctattgcatggcaattaaattagaaattaaaaatctttataaaatatttggcgagcatccacagcgagcgttcaaatatatcgaacaaggacttagtaaagaacaaattctggaaaaaactgggctaagccttggcgtaaaagacgccagtctggccattgaagaaggcgagatatttgtcatcatgggattatccggcagcggtaaatccacaatggtacgccttctcaatcgcctgattgaacccacccgcgggcaagtgctgattgatggtgtggatattgccaaaatatccgacgccgaactccgtgaggtgcgcagaaaaaagattgcgatggtcttccagtcctttgccttaatgccgcatatgaccgtgctggacaatactgcgttcggtatggaattggccggaattaatgccgaagaacgccgggaaaaagcccttgatgcactgcgtcaggtcgggctggaaaattatgcccacagctacccggatgaactctctggcgggatgcgtcaacgtgtgggattagcccgcgcgttagcgattaatccggatatattattaatggacgaagccttcagcgcgctcgatccattaattcgcaccgagatgcaggatgagctggtaaaattacaggcgaaacatcagcgcaccattgtctttatttcccacgatcttgatgaagccatgcgtattggcgaccgaattgccattatgcaaaatggtgaagtggtacaggtcggcacaccggatgaaattctcaataatccggcgaatgattatgtccgtaccttcttccgtggcgttgatattagtcaggtattcagtgcgaaagatattgcccgccggacaccgaatggcttaattcgtaaaacccctggcttcggcccacgtagcgcactgaaattattgcaggatgaagatcgcgaatatggctacgttatcgaacgcggtaataagtttgtcggcgcagtctccatcgatagccttaaaaccgcgttaacgcagcagcaaggtcttgatgcggcgctgattgatgcgccgttagcagtcgatgcacaaacgcctcttagcgagttgctctctcatgtcggacaggcaccctgtgcggtgcccgtggtcgacgaggaccaacagtatgtcggcatcattagcaaaggaatgctgctgcgcgctttagatcgtgagggggtaaataatggctgatcaaaataatccgtgggataccacgccagcggcggacagtgccgcgcaatccgcagacgcctggggtacaccgacgactgcaccgactgacggcggtggtgctgactggctgaccagtacgcctgcgccaaacgtcgagcattttaatattctcgatccgttccataaaacgctgatcccgctcgacagttgggtcactgaagggatcgactgggtcgttacccatttccgtcccgtcttccagggcgtgcgcgttccggttgattatatcctcaacggtttccagcaattgctgctgggtatgcccgcaccggtggcgattatcgttttcgctctcatcgcctggcagatttccggggtcggaatgggtgtggcgacgctggttagcctgattgccatcggcgcaatcggtgcctggagccaggcaatggtgactctggcgctggtgttaaccgccctgctgttctgtatcgtcatcggtttgccgttggggatatggctggcgagaagtccgcgagcggcgaaaattattcgtccactgcttgatgccatgcagaccacgccagcgtttgtttatctggtgccaatcgtcatgctatttggtatcggtaacgtgccgggcgtggtggtgacgatcatctttgctctgccgccgattatccgtctgaccattctggggattaaccaggttccggcggatctgattgaagccagccgcagtttcggtgccagcccgcgccagatgctgttcaaagttcagttaccgctggcgatgccgaccattatggcgggcgttaaccagacgctgatgctggccctttctatggtggtcatcgccagcatgattgccgtcggcgggttgggtcagatggtacttcgcggtatcggtcgtctggatatggggcttgccaccgttggcggcgtcgggattgtgatcctcgccattatcctcgatcgtctgacgcaggccgttgggcgcgacagtcgcagtcgcggcaaccgtcgctggtacaccactggccctgttggtctgctgacccgcccattcattaagtaactctgcacttgcccggtgacgccgggcattatcaccctgccaaaaaaaggaataacaatgcgacatagcgtactttttgcgacagcgtttgccacgcttatctctacacaaacttttgctgccgatctgccgggcaaaggcattactgttaatccagttcagagcaccatcactgaagaaaccttccagacgctgctggtcagtcgtgcgctggagaaattaggttataccgtcaacaaacccagcgaagtagattacaacgttggctacaccagccttgcttccggcgatgcaaccttcaccgccgtgaactggacgccactgcatgacaacatgtacgaagctgccggtggcgataagaaattttatcgtgaaggggtatttgttaacggcgcggcacagggttacctgatcgataagaaaaccgccgaccagtacaaaatcaccaacatcgcacaactgaaagatccgaagatcgccaaactgttcgataccaacggcgacggaaaagcggatttaaccggttgtaaccctggctggggctgcgaaggtgcgatcaaccaccagcttgccgcgtatgaactgaccaacaccgtgacgcataatcaggggaactacgcagcgatgatggccgacaccatcagtcgctacaaagagggcaaaccggtgttttattacacctggacgccgtactgggtgagtaacgaactgaagccgggcaaagatgtcgtctggttgcaggtgccgttctccgcactgccgggcgataaaaacgccgataccaaactgccgaatggtgcgaattatggcttcccggtcagcaccatgcatatcgttgccaacaaagcctgggccgagaaaaacccggcagcagcgaaactgtttgccattatgcagttgccagtggcagatattaacgcccagaacgccattatgcatgacggcaaagccagtgaaggcgatattcagggacacgttgatggttggatcaaagcccaccagcagcagttcgatggctgggtgaatgaggcgctggcagcgcagaagtaatttttattcgggcggataaggcgtttttgccgcatccgccgttctgtgcacaatgcctgatgcgacgctggcgcgtcttatcatgcctacaaaccacatcgcacatttcaacaatctatctttcatcccatattcatcaacatccgctattattgatttccagcttaatcatcacctgatgaacaaaaataatgactaaacctaatcatgagcttagcccggcgctgatcgtgctgatgtctatcgccaccggtctggcggtagccagtaactattacgcccagccattgctcgacaccatcgcgcgtaacttttccctttccgccagtagcgcaggctttattgttaccgccgcgcagttgggctatgccgcaggtctactgtttcttgttcccctcggtgatatgtttgaacgccgccgcctgattgtcagcatgaccttactggcggcatgttgattaccgccagcagtcagtcgctggcgatgatgatcctcggtacggcattaaccggtttattcagtgtcgtggcacaaattctggttccgctggcagcgacgctggctagtccggataaacgcggcaaagtggttggcactattatgagcggtctgctgttggggatcttgctggcacggacagttgccggattgctggcgaatctcggcggctggcgcaccgtcttttgggttgctagcgtgttaatggcactgatggcgctggcattatggcgtggtctgccacaaatgaaaagtgaaacccacctcaactacccacagttgttgggttccgttttcagtatgtttatcagcgataaaattctgcgtacccgcgcgttgctgggctgcctgacctttgccaatttcagcattctctggaccagtatggcctttttgcttgccgctccaccttttaactacagcgatggtgtcattggtctgtttggacttgcgggagctgccggagcgttgggcgctcgtccggcgggcggttttgccgataagggcaaaagccaccacaccacaactttcggtctgctgctgctattacttagttggctggcgatctggtttggtcacacttccgtactggcgttgattatcggaatcctggtgctggatctcaccgtgcagggcgtgcatatcactaaccagacggtaatttatcggatacatcctgatgcgcgcaatcgcctgaccgcaggttacatgactagctactttattggcggtgccgccggtagcctaattagtgccagtgcctggcaacatggcggttgggctggcgtttgtctggctggcgcgacgattgccctggttaacttactggtctggtggcgaggttttcatcgtcaggaagccgcaaattaagcaatcagcaaccgttttcgtggctttacacttataagggtgttaagaagcccatcagtctgataaggttaagatattcattcagtctatttataatattaacaatcgttaagcgtacactctatggaaagccctactccacagcctgctcctggtagcgcgaccttcatggaaggatgcaaagacagtttaccgattgttattagttatattccggtggcctttgcgttcggtctgaatgcgacccgtctgggattctctcctctcgaaagcgtttttttctcctgcatcatttatgcaggcgcgagccagttcgtcattaccgcgatgctggcagccgggagtagtttgtggattgctgcactgaccgtcatggcaatggatgttcgccatgtgttgtatggcccgagtctgcgtagccgtattattcagcgtctgcaaaaaagcaaaaccgccctgtgggcgtttggcctgacggatgaggtttttgccgccgcaaccgcaaaactggtacgcaataatcgccgctggagcgagaactggatgatcggcattgccttcagtagttggagtagctgggtatttggtacggtaataggggcattctccggcagcggcttgctgcaaggttatcccgccgttgaagctgcattaggttttatgcttccggcactctttatgagtttcctgctcgcctctttccagcgcaaacaatctctttgcgttaccgcagcgttagttggtgcccttgcaggcgtaacgctattttctattcccgtcgccattctggcaggcattgtctgtggctgcctcactgcgttaatccaggcattctggcaaggagcgcccgatgagctatgaggttctgctgcttgggttactagttggcgtggcgaattattgcttccgctatttgccgctgcgcctgcgtgtgggtaatgcccgcccaaccaaacgtggcgcggtaggtattttgctcgacaccattggcatcgccagcatatgcgctctgctggttgtctctaccgcaccagaagtgatgcacgatacacgccgtttcgtgcccacgctggtcggcttcgcggtactgggtgccagtttctataaaacacgcagcattatcatcccaacactgcttagtgcgctggcctatgggctcgcctggaaagtgatggcgattatataacccacaagaatcatttttctaaaacaatacatttactttatttgtcactgtcgttactatatcggctgaaattaatgaggtcatacccaaatggatagtagctttacgcccattgaacaaatgctaaaatttcgcgccagccgccacgaagattttccttatcaggagatccttctgactcgtctttgcatgcacatgcaaagcaagctgctggagaaccgcaataaaatgctgaaggctcaggggattaacgagacgttgtttatggcgttgattacgctggagtctcaggaaaaccacagtattcagccttctgaattaagttgtgctcttggaagttcccgtaccaacgcgacgcgtattgccgatgaactggaaaaacgcggttggatcgaacgtcgtgaaagcgataacgatcgccgctgcctgcatctgcaattaacggaaaaaggtcacgagtttttgcgcgaggttttaccaccgcagcataactgcctgcatcaactctggtccgcgctcagcacaacagaaaaagatcagctcgagcaaatcacccgcaaattgctctcccgtctcgaccagatggaacaagacggtgtggttctcgaagcgatgagctaacgcgtcatctcgctcaaaaatccagatttataaaagaaaaaatgactggccagcatcgcaacatgctggcctttttggcaagcaggtcggctcagccgatgagttaagaagatcgtggagaacaatatgagcgcaaatgcggagactcaaaccccgcagcaaccggtaaagaagagcggcaaacgtaagcgtctgctcctccttctcaccttgctctttataattattgccgtagcgatagggatttattggtttttggtactgcgtcacttcgaagaaaccgatgacgcatacgtggcagggaatcaaattcaaattatgtctcaggtgtctggcagcgtgacgaaagtctgggccgataacaccgattttgtaaaagaaggcgacgtgctggtcactctcgacccgacagatgctcgccaggcgtttgaaaaagccaaaactgcactggcttccagcgttcgccaaacccaccagctgatgattaacagcaagcagttgcaggcgaatattgaggtgcagaaaatcgccctcgcgaaagcacaaagcgactacaaccgccgtgtgccgctgggcaatgccaacctgattggtcgcgaagagctgcaacacgcccgcgacgccgtcaccagtgcccaggcgcaactggacgtcgcgattcaacaatacaatgccaatcaggcgatgattctggggactaaactggaagatcagccagccgtgcaacaggctgccaccgaagtacgtaacgcctggctggcgctggagcgtactcgtattatcagtccgatgaccggttatgtctcccgccgcgcggtacagcctggggcgcaaattagcccaacgacgccgctgatggcggtcgttccagccaccaatatgtgggtggatgccaactttaaagagacgcagattgccaatatgcgtatcggtcagccggtcactatcaccacggatatttacggcgatgatgtgaaatacaccggtaaagtggttggtctggatatgggcacaggtagcgcgttcagtctgcttccagcgcaaaatgcgaccggtaactggatcaaagtcgttcagcgtctgcctgtgcgtatcgaactggaccagaaacagctggagcaatatccgctgcgtatcggtttgtccacgctggtgagcgtcaataccactaaccgtgacggtcaggtactggcaaataaagtacgttccactccggtagcggtaagcaccgcgcgtgaaatcagcctggcacctgtcaataaactgatcgacgatatcgtaaaagctaacgctggctaatccagaggtgcgtgtgatgcaacagcaaaaaccgctggaaggcgcgcaactggtcattatgacgattgcgctgagtctggcgacattcatgcaggtgctggactccaccattgctaacgtggcgatccccactatcgccgggaatctgggcagtagcctcagccagggaacgtgggtaatcacttctttcggggtggcgaatgccatcagcatcccgcttaccggctggctggcaaagcgcgtcggggaagtgaaactgttcctttggtccaccatcgcctttgctattgcgagctgggcgtgtggtgtctccagcagcctgaatatgctgatcttcttccgcgtgattcaggggattgtcgccgggccgttgatcccgcttagccaaagtctattgctgaataactacccgccagccaaacgcagcatcgcgctggcgttgtggagcatgacggtgattgtcgcgccaatttgcggcccgatcctcggcggttatatcagcgataattaccactggggctggatattcttcatcaacgtgccgattggcgtggcggtggtgttgatgacactgcaaactctgcgcggacgtgaaacccgcaccgaacggcggcggattgatgccgtggggctggcactgctggttattggtatcggcagcctgcagattatgctcgaccgcggtaaagagctggactggtttagtagtcaggaaattatcatccttaccgtggtggcggtggtggctatctgcttcctgattgtctgggagctgaccgacgataacccgatagtcgatctgagcttgtttaagagccgcaacttcaccatcggctgcttgtgtatcagcctcgcgtatatgctctacttcggcgctattgttctgctgccgcagttgttgcaggaggtctacggttacacggcgacctgggcaggtttggcctctgcgccggtagggattattccggtgatcctgagcccgattatcggccgcttcgcgcataaactggatatgcggcggctggtaaccttcagctttattatgtatgccgtctgcttctactggcgtgcctatacctttgaaccaggtatggattttggcgcgagcgcctggccgcagtttatccaggggtttgcggtggcctgcttctttatgccgctgaccaccattacgctgtctggtttgccaccggaacgactggcggcggcaagcagcctctctaactttacgcgaacgctggcggggtctatcggcacgagcataaccacgaccatgtggaccaaccgcgagagcatgcaccatgcgcagttgactgagagcgtaaacccgttcaacccgaatgcccaggcgatgtacagtcaactggaagggcttgggatgacgcaacagcaggcaagtggctggattgcccagcagatcaccaatcaggggctgattatttccgccaatgagatcttctggatgagtgccgggatattcctcgtcctgctggggctggtgtggtttgctaaaccgccatttggcgcaggtggcggcggaggcggtgcgcactaagtacaactaagccagttcatttgaactggcttttttcaattaattgtgaagatagtttactgattagatgtgcagttcctgcaacttctctttcggcagtgccagttcttcgttgctgttgatgcgtacgtcacgttccagaatgctacgcgcaatatcctgcgcttcctgcaagctgtgcatctggtaagtgccacactggtagacgttcagttccgggatctgattctgatcctgcactttcagcacgtcttccattgccgctttccaggcatcagcaacacgctgctcatctggcgtaccaatcagactcatataaaaaccggtgcggcagcccattgggctgatatcgataatctctacaccattaccgttaagatggttacgcataaaaccagcaaacaggtgctccagggtatggatccctctttctggcatcacttctttgttcggcacgcagaagcgcagatcgaacacggtgattgcgtcgccatgcggggtgttcattgttttcgccacccgaactgcaggcgcttccatccgggtatgatcgactgtgaagctatctaacaacggcatttagccacctccggtaatttttttaaaaattttctgaactctttcttcccaggcgagtctgagtatatgaaagacgcgcatttgttatcatcatccctgaattcagagatgaaattttggccactcacgagtggcctttttcttttctgtcaggcgtgtttttccagccacaccgcaaacggttcggtatcagcggcttccatttcctgctgacggcgttcagacgcctcgcgctcggctacaaaatcctcttcgcgcagaatttccagcggctcttcacgcagcagattacggtaggcttctgcaaatgctttgcctgttccgccaataccagtatcaatcatagaccttaagatacgggcagagaaagtcagatcgggattatcgaagcaggcaaccagttcatcacacactttctgatacgcttcgccgccgttaatactatccagcgtttgcgcgacgcgtttcagatcgcggaacagatctttacccacctgcggtaacgggaactgtgcggtttcgcagccgatacccagcgtcagacccggtttgcgaccttcgaggatcacccggttccagttaacgcgtgtacaggcaagttcgctactgctcatttccggtgcatcagccagcgcacaccagaccataaacaggtcgaggaatcgcacctgctgttcatctacaccaatcgggctgaacgggttgatgtccaggctacgcacttcaatatattcaatgccgccacgtaacagcgcatcagaagggctctcgccgctgcgggtaacgcgttttggacgaatcggcgcgtacagttcgttttcaatctgcaacacgttgctgttgatttgcagcctcttaccgtctttctcaataccaatcttcgcgtactcttcgcttggcgttttgattgcctgtttaaggcccgctacgtactcgtaaagatcgttgaaggtaataccaagattgctttggcttttattggtatagccgagatcgctcaaacgaagagaggtcgcatacggcaggtaatacataccgcactcggttttctcaaacggcaggctcgttggttttccttgcaggaaagaagaacaaatcgccggagatgcaccaaacagataaggaatgacccaaccgaaacgatagtaattgcggataacgcggaaatagcccgcagaaattttctctttggcatcagcgccgctgatatcaccgcacttcgcttgccagaatgccattggcaaagagaaattgtagtgcacgccggaaatggtttgcatcagcgcgccgtagcgatttttcagcccttcacgatacagcgttttaaagcgtccggtgttagaagtgccgtactgtgccagttcgatgtcctgaccttctgcgatgtagcatggcatacttaacggccacatccgctcatcgcccatattgcgcgccgtataacgatgcagatcgcgcataaaggtcagcatatgttcaatatcaccatccactggtgtaatgaattccagcaatgcttccgcaaaatcggtagtaatccatttgtgcgtcagtgcggaacctaatgcttcaggatgacctgttgttgccagtgtgccatcagcattaacacgcaaagtttcgcgctccagcccacgctgtatcccctttaacgcctgaggatgtttttccagccaggccagcgcctgacttacgtccgggatcaaattgacctcccgcctgtcaaaatcgttttaattagcataactgtaatggtgaccatatgtgcaggcctacaattagtgccaccacatcatgccctgaacggtcgctgctgcaactgcaacatagcgtaacgctttaccaaggcacaaaaaaaagattaccggtccccagctgatgcgcatccatcccgctaacagacacagtaaatcgccaaccacgggcatccagcttaataatagcgtgactgcaccatagcgtttcagccagccggtagctttctcttgccagcggcttgttttacgcaatggaaagaaacgcccaaggataacgttagttaaccctccaaggctattacccattgttgctgttaaaactaaaacccagggatgactgatcccggaaagcaacattgccaccagcacgacttcggagttgccgggtaatagtgtagcgctgagaaaactactggcaaacaagctgaaaaggcttaacgcttcactcacagcaagcgaacatccacggcgtccatgcctgctgcacgggccgcctgaataccgaaatcggcatcttcaaagaccacacactgcgtcggttgcacgcccatacgctgcgcgcacaacaaaaatgtgtctggcgcgggtttatggtgtttgacgtgatcggcagcgacgacggcgtcaaaataatggcgtaatcccaggtgcgccagcaatgcctcagcgatggcgctttcactccccgttcctacagccattgggcgacgaccatgccaacttttcaccacatcaacaagaggaagcggttcgacgctatccagcagcatacttcttactgcttctgttttttcacgcgctaacgcatgcgggtcgagatcggcctgattcagctcaataattgcctgagcaatacgccaggtggggcttccattaagcgcaatcatcgcctgaatatcgtactgaagaccgtagtgccctaatacttcgcgccacgctttacggtgcgtaggctccgtatccaggattgtgccatccatatcaaaaattaaacctgcataacgctcgtacatggtcttctcgcaagtcgaaaaatatgacgctactttagcgtaattgcttgattttgtcgctgatggcgaaggagaagaaaattcaggaaatggataaaggagttatttagaaatgagatatttttgaaggaaattttttggagaagatggtgcatccgggaggatgactcactgacgttcgcccttcgggccgttgctggcgcaacgttatccttcctggtgcctgcggttaataccgctatctcttcgataccttcattgctgaaggttacggagaatatggtgcatccgggaggattcgaacctccgaccgctcggttcgtagccgagtactctatccagctgagctacggatgcatcgggaaaacttattctactgctgatattgataccgctactaaagccatatcaattaagagatggtgcatccgggaggattactcgccttgcggctcgcccttcgggccgttgctaaagcaacgttatcatccctagtgcctgcggttaattccgctacctcttcgataccttcattgctgaagatttcggagaatatggtgcatccgggaggattcgaacctccgaccgctcggttcgtagccgagtactctatccagctgagctacggatgcatcgggaaatttattttactgctgatattgataccgctactaaagccatatcaagtaagagatggtgcatccgggaggattcgaacctccgaccgctcggttcgtagccgagtactctatccagctgagctacggatgcatcgggaaacttactttactgcagattttttgataccgctactaaagccgtatcaagtaagagatggtgcatccgggaggattactcgccttgcggctcgcccttcgggccgttgctaaagcaacgttatcctccctggtgcctgcggttattaccgccacctcttccataccttcatcgctgaaagtacgtagaatatggtgcatccgggaggattcgaacctccgaccgctcggttcgtagccgagtactctatccagctgagctacggatgcaaatggcggtgaggcggggattcgaaccccggatgcagcttttgaccgcatactcccttagcaggggagcgccttcagcctctcggccacctcaccacacgcctcttacgagtgcttcgaagaacttgtttatcgctcatcgtcgctgcgtggcgcacatattactttctgagacttataagtcaaacaatttttcctacacttttatcgtttgcacacttcacgttcaattagtctgtaaaaacgtcaaaaagagtgttttatcaacagaagaatggaggtctgacagatagtagtaatgcaaaaaaatggagacttaagttgaatgaacgggagtaaagcgaaaagactatagagtgaaggagaaattttgagggtgcgtctcaccgataaagatgagacgcggaaagattagtaactggactgctgggatttttcagcctggatacgctggtagatctcttcacggtgaacagaaacttccttcggggcatttacgccaatacgtacctggttgccctttacccctaaaactgtcacggtgacctcatccccaatcatgagggtctcaccaactcgacgagtcagaatcagcattctttgctccttgaaagattaaaagagtcgggtctctctgtatcccggcattatccatcatataacgccaaaaagtaagcaatgacaaacacattacatctaagcagtcatggcattacattctgttaaacctaagtttagccgatatacacaacttcaacctgactttatcgttgtcgatagcgttaatgcgaatgccgtgaagcgagtccacggcattgcctgacgcttatattattgcaatttcgcgctgacccagcctttcacactggctaacgctgcaggtaaggccgcagcatccgtaccaccggcttgcgccatgtcaggacgtccaccacccttgccgcccacctgctgagcgaccataccaatcagttcccctgctttcacacgatctgtgacgtccttagatacgcctgcaatcagagaaaccttaccttcgactaccgttgccagcacgataattgtgctccccagctgattttttaaatcgtcaaccatggtacgcaacattttcggctcaacaccgctaagctcgctaaccaacagcttaacaccattaacatcaattgccttactggaaagatttgcgctctcctgtgcggcagcttgttctttaagctgttgtaactctttttccagctgacgcgtacgttccagtacactgcgcactttatcagccagattattgctatcgcctttcagcagatgcgcgacttcgcttaagcgatcgctgtctgcatgaacggtggcgatagcaccttctccggttaccgcttcgatacgacgaacgcctgcagcagtaccgctttcagagatgatgcggaacagaccaatatcaccagtgcggctggcgtgagtaccgccacacaactcggtagagaaatcgcccatgctcagcacgcgtacgcgctcatcatacttctcgccgaacagcgccatcgcacctttcgctttcgccgcttcgagatccatgatgttggtttcgatcggcaaattgcgacgaatctgtgtgttcaccaggtcttcgaccgcacgaatctcttctggtttcatcgcttcgttgtgactgaagtcgaagcgcagcaccttgtcgttaaccagactacctttctggcttacatgagtacccagaacctggcgcagcgcagcgtgcatcaggtgcgttgcggagtgattcagacgaatacgggcgcgacgagcctcatcaacatcagcctgcaccgcgtcgcccactttcagagaacccgcagcaagtttaccgatgtgaccaatcgcctggccgtatttctgcgtatcttccaccgcaaaggagaagttagcgcctttcagttcgcctttatcgccaacctgaccgccggattccgcatagaatggcgtttgatccagcacgaccacagcttcctggcctgcattgatggcatcaaccgctttaccatcaacaaacagcgcagtcactttgccgttcagttccagatggtcatagcctttaaattcagatgcactgtcaacacggatcattgcgttgtaatcggcaccaaagccgctggcttcgcgcgcgcgacgacgctgctcttccattgcagcttcaaaaccagcttcgtcaactttgatgttgcgctcacgacaaacatcagccgtcaggtcaaccgggaagccataggtgtcgtacagacggaaagcagtttcaccatccagcgtatcaccagaaagttttgccagctcttcatccagcaacgccagaccgcgctccagagtacgagcaaactgctcttcttcagtcttcagcacctgctcaacctgcgcctgctggcgtttcaggtcttcacccgcagagcccataacgtcgatcagcggaccaaccagtttgtagaagaaggtttctttcgcgccgagcatattaccgtgacgcactgcgcgacgaatgatacgacgcagtacataaccacggttttcattggacggcattacgccatccgcgatcaggaacgcacaagaacgaatgtggtcagcgattacgcgcaggcttttattgctcagatcggttgcgccagtgactttcgctaccgcctggatcagcgtgcggaacaggtcgatgtcatagttagagttaacgtgttgcagcaccgcagcaatacgctccagacccataccggtatctacagacggcttcggcagcggttccatcgtgccatcggcctggcggttgaactgcatgaagacgatgttccagatctcaatgtagcggtcgccgtcttcttccgggcttcccggagggcccccccaaatgtggtcgccgtgatcgtagaagatttcggtgcacgggccgcacggaccagtgtcacccatctgccagaagttgtcagatgcgtatggcgcacctttgttatcgccgatgcgaataatacgttcgcgcgggatccctacttctttttcccagatttcgtaggcttcgtcgtcgctttcatagacggtaacccacagacgctctttcggcagggcaaaccatttttcgctggtcagcagttcccatgcaaactgaatggcatcgtgtttgaaatagtcgccgaagctgaagttgcccagcatttcgaagaaggtatggtgacgcgcggtgtaaccgacgttttccaggtcgttgtgtttaccacccgcacgcacgcagcgttgggaagtggtagcgcgggaataattacgcttgtcgagcccaaggaacacatccttgaactggttcatcccggcgttggtaaacaacaaagttgggtcgttatggggtaccagggagctgctggcaactacctgatgtcccttactatggaaaaagtcgagaaacgcctgacggatctcagcggtgctcttgctcataattatcctgaaatcaagctaacgaaatatcgccaccagctccagcgtgtcttaaccgccgggctggtaactgaaaagtgggaataagataagttttcttgactgggaagtaaaataccgtatgcgttcagtcggcaaaatttcgccaaatctcctggatatcttccatcagatagccacgatagagcagaaaacgctggatcttaactttttcactaaagacagttggcaaaggttcgccatattttcgcgtcgcctgatcgcgcgccagtgcgcaccagtcgatgtcacattcacgcatcgctttttctgtcgcttcgcgggaaatacctttctgattcagttcctggcgaatacgcgcaggtccataacctttgcggctacggctggcgataaagcgcgcaacaaatcggctgtcatcgagatagccatgttcatggcaccaggcaataacgcgctcgtaatcttctgccgtagcatcaatctcttctgggccatttttgcccataatcggtgccgcgagtttacgtcgcagttcttgctcactgtgatcgcgcaccgccagaatgcgtaccgcacgatccaacaggcgagcatatgccgggcgacgggatgtactttctgtcatggcatatccttacaacttaaaaaagcaaaagggccgcagatgcgacccttgtgtatcaaacaagacgattaaaaatcttcgttagtttctgctacgccttcgctatcatctacagagaaatccggcgtactgttcgggttgctcagcagcaactcacgtactttcttctcgatctctttcgcggtttccgggttatctttcagccaggcagtcgcattcgctttaccctgaccgatcttctcacctttgtagctgtaccacgcgcctgctttctcgatcagcttctcttttacgcccaggtcaaccagttcgccgtagaagttgataccttcgccgtagaggatctggaattcagcctgtttaaacggcgcagcgattttgttcttcaccactttcacgcgggtttcgctacccaccacgttttcgccctctttcaccgcgccgatacgacggatgtcgagacgaacagaggcgtagaatttcagcgcgttaccaccggtagtggtttccgggttaccgaacatcacaccaattttcatacggatctggttgatgaagatcagcagcgtgttggactgcttcaggttacccgccagcttacgcatcgcctggctcatcatacgtgccgcaaggcccatgtgagagtcgccgatttcgccttcgatttccgctttcggcgtcagtgccgccacggagtcaacgacgataacgtctactgcgccagaacgcgccagggcgtcacagatttccagtgcctgctcgccggtgtccggctgggagcacagcaggttgtcgatatcgacgcccagtttacgtgcgtagattgggtccagcgcgtgttcagcatcgataaacgcacaggttttaccttcacgctgcgctgcggcgatcacctgcagcgtcagcgtggttttaccggaagattccggtccgtagatttcgacgatacggcccatcggcagaccacctgccccaagcgcgatatccagactaaggctaccggtagagatggtttccacatccatggaacggtcttcacccaggcgcatgatggagcctttaccaaattgtttctcaatctggcccagtgctgccgccaacgctttctgtttgttttcgtcgatagccatttttactcctgtcatgccgggtaataccggatagtcaatatgttctgttgaagcaattatactgtatgctcatacagtatcaagtgttttgtagaaattgttgccacaaggtctgcaatgcatacgcagtagcctgacgacgcaccgcatcacggtcgccgctgaagcattcccgccgggtaatgccttcaccgcgggcagtggcaaaagcaaaccagacggtgccgacaggcttctcttcactgccgccatccggcccggcgataccactaatagacacggcataatcagcacgagccgctttcagtgcgcctatcgccatttccaccacgacgggttcactcaccgcgccatgctgcgccagcgtctcttcgcgtacgccgatcatctgcgctttggcttcgttactgtaggtgacaaatccgcgttcaaaccaggcggagctaccggcaatatcggtaatcactttcgctacccaaccaccggtacaagactcggcagttgttacggttgcgccacgggctttcagcgcctgcccaacctgttcacttaactgcatcagttcactgtcagtcatcacaacctctgtcagtcaaaaatttatgccggacaagatagcactttcgtcaggaagatggtgttggcgttgcaattttacgaggaggattcagaaaaaagctgattagccagagggaagctcacgcccccctcttgtaaatagttactgtactcgcgccagcgccacggcttgtcctaactgccagaccgccattgcgtaatgggtgctgtggttgtaacgggtgatggtgtagaagttcggcagaccgtaccagtactggtagccggtgccaacatccagacgcagcaggctggcttgttgatggttgcccagcggctgctgtggcgttaaacctgcggcggcaagctggctaatgctgtacttagttttgaagccatttggcaagcctggagcctgaccgtttgccattaccgcgacctgatcgcctttcacccagccgtgcgctttgaaatagttcgccacgctaccgatcgcatcaaccggatcccacaggttgatatgcccgtcgccgctgaaatctaccgcatattgtttgtaagagctcggcataaactgtccgtagcccatcgccccggcaaaggaacctttcagattgagcggatcgtcctgctcgtcgcgcgccatcaacaggaaggtttccagctcgccagagaaatactccgcgcggcgtgggtagttaaaactcagcgttgccagcgcatcgaggatgcgagttttccccatcacgcgcccccagcgggtttcaacgccgataatcccgacgataatttccggcggtactccatacacctgccacgcgcgattcaacgcatcttcatactgattccagaaaaccacaccgttctgcacgttgtccggcgtaataaattttttgcgataacggagccatgcgccgttcggaccacttggcggtttcacgcttgtggttggtgcctggttatccatcagccgcagtacgctatccagacgcttcgcctgggagagaatttcctgcaactgctgacgatcgaaaccgtgtttgttcaccattttgtcgatgaactgctgggcattcgggttattagcgaaatcgccgcccatctgcatcacattgtgctgcggctcaagcaggaagccgccagacggcgttccggtggtcgtatcagtctcagtaggttttggcttgctgctacaggcggcaagcaacacaaaaaggggaagcaatgttacataacgacgcttgaacatgaggggtccatttaacagattcaaccaggggcaagtatggtaaagcatcacgccccgcacaaggaagcggtagtcactgcccgatacggactttacataactcaactcattcccctcgctatccttttattcaaactttcaaattaaaatatttatctttcattttgcgatcaaaataacacttttaaatctttcaatctgattagattaggttgccgtttggtaataaaacaataaatcctgaaggagagaacaatgatagaaaccattactcatggtgcagagtggtttatcgggctgttccaaaagggcggagaggtgtttaccgggatggtgaccggcattcttccgctgttgattagcctgctggttatcatgaacgcactgattaattttatcggtcagcatcgtattgaacgttttgctcaacgttgcgccggtaaccctgtttcccgttacctactgttaccgtgcattggcacgtttgtcttttgcaatccgatgaccctaagcctgggtcgctttatgccggaaaagtacaaacccagctactacgcggcggcctcttatagctgccacagtatgaatggcctcttcccccatatcaaccctggcgaactgtttgtttatcttggcattgccagcggtctgacaacgctgaacctgccacttggcccactggcggtgagttatctgctggttggtctggtcaccaatttcttccgcggctgggtgaccgatctgaccaccgccatttttgagaaaaagatgggcattcaacttgaacaaaaagttcacctggcaggagcaacaagttgaaataacacctggcaggagcaacatcatgacgcatattcggatcgaaaaaggaacgggtggctggggcggcccgcttgagctgaaagccacgccgggaaaaaaaatcgtctatatcaccgccggtacccggcctgcgattgttgacaaactggcacagcttactggctggcaggctattgacggatttaaagaaggtgaacccgcggaggcggaaattggtgtcgcggtaatcgactgtggcggcacattacgctgcggcatctatccgaaacgacgtattcccaccattaatatccacagcacgggcaagtccggtccgctggcgcagtacattgtggaagatatttatgtctctggcgtaaaagaagaaaacatcactgtagtaggtgatgcgacaccacaaccctcttccgtgggccgtgactatgacaccagtaagaaaatcaccgaacaaagcgatggtttactggcgaaggtgggaatgggcatggggtccaccgttgcggtgctgtttcaatctggtcgtgacaccatcgacactgtattaaaaaccattctgccgtttatggcattcgtcagcgcgctcattggcatcattatggcttctggccttggtgactggattgcccacggtcttgctccgctggcgagccatccactgggtctggtcatgctggcgctcatctgttccttcccactgcttagtcctttcctcggcccaggcgcagttatcgcacaggttatcggcgtattgattggcgtgcagattggtctcggcaatattccgccgcatctggctttaccggcactgtttgccatcaacgcgcaggcggcctgcgacttcatcccggtcggtttgagcctggcggaagcccgtcaggacacggttcgcgtcggtgtcccttctgtactggtgagccgctttttaaccggcgcgccgactgtactgatcgcctggtttgtctccggttttatctatcaataaaggctgaaacatgaccgttatttatcagaccaccatcacccgtatcggcgcgagtgccattgacgccctcagtgaccagatgctcatcacctttcgtgaaggcgcgcctgcggacctcgaagagtattgcttcattcattgccacggcgagttgaaaggtgcactccatcccggtttgcaatttagtctcgggcagcatcgctatccggtgaccgctgttggcagcgtggcggaagacaaccttcgcgaactgggtcatgtcaccctgcgcttcgatggtttaaacgaagcggaatttccgggcactgtccatgtggcaggccctgtccccgacgatatcgcgccgggaagcgttttgaagtttgaatctgttaaggagtaaaaaatgaatcaggttgccgttgtcatcggtggtgggcaaaccttaggcgcgttcctgtgccacggtctggctgccgaggggtatcgcgtcgcggttgtcgatattcagagcgacaaagccgcaaatgtggcacaagaaattaacgccgaatatggtgaaagtatggcgtacggttttggtgctgacgccactagcgagcaaagcgttctggcgctctctcgtggggtagatgaaatctttggtcgcgtggatttgctggtctacagcgccggaatagcaaaagcagcctttatcagcgacttccagctcggcgattttgaccgtagcctacaggtgaatctggtgggttatttcctgtgtgcgcgtgaatttagccgtttgatgatccgcgacgggattcaggggcgcattattcagatcaacagcaaatccggcaaagtgggcagcaaacacaactctggctacagcgcagcgaaatttggtggcgtcgggctgactcaaagtctggcgctggatctggcggagtacggcattacggtgcatagtctgatgctcggtaacctgctgaaaagcccgatgttccagagtctgttgccacaatacgcgaccaagctgggtatcaaaccggatcaagtcgagcagtattacatcgacaaagtaccgctcaaacgcggctgcgattatcaagatgtgctgaatatgctgctgttctacgccagtcctaaggcgagctactgcaccggacagagcatcaatgtcaccggcggtcaggtgatgttctgatcaacagcggagatccattaaggatctccgtgagactatagaatgcctgatgcgctacgctcatcaggcatacaggacttccgccactacattaaggaaaagttatggtatccgcactcatcaccgtcgccgttatcgcctggtgtgcgcaactggccttaggcggctggcaaatttctcgttttaaccgtgccttcgacacactatgccagcaagggcgggttggcgtgggccgttccagcgggcgctttaaaccgcgggtcgtggtcgccatcgcgctggacgatcagcagcgcatcgtcgacaccttgtttatgaaaggactgaccgtcttcgcccgaccgcaaaaaattcccgcaattaccggtatgcatgcgggtgatttacagcccgatgtgatctttccccatgatccactaagtcagaatgctctaagtttggcgcttaaactgaaacgtggataatttcgttgtgaatgttacttgcttgcgaagttatcattttgaaacctaaatcaggtaatcacgcccatgaaacctcgtcagcgtcaggccgccattctggagtatctgcaaaagcagggtaaatgcagcgttgaagaattggcgcaatactttgacaccacaggcacaaccattcgcaaagatctggtcattctggaacatgccggaaccgtcattcgtacttatggcggagtggtgttgaataaagaggaatccgatccgcctatcgatcataaaacactcatcaacacccacaagaaagagctgattgcagaagctgccgttagttttatccatgatggcgatagcatcattcttgatgctggcagtaccgttttgcagatggttcccctgctcagccgctttaataacatcacggtgatgaccaacagcctgcatatcgtcaatgcgctatccgaactggataacgaacaaactatcctgatgccaggcggaacgtttcgcaaaaaaagcgccagttttcacgggcaactggcagagaatgccttcgagcatttcaccttcgataaattgtttatgggcaccgacggcatcgatctcaatgcgggcgtaaccacctttaacgaggtttataccgtcagtaaggcaatgtgcaatgccgcgcgcgaagtgattttgatggcggacagtagtaagtttggccgtaaaagccccaacgtagtttgcagtcttgaaagcgtcgataagctgattaccgacgcaggtatcgatccggcgtttcgtcaggcgctggaagagaaagggatcgatgtgatcataaccggagagagcaatgagtgaagcactactgaacgcgggacgtcagacgttaatgctggagttgcaggaagcaagccgtttaccggaacgtctgggcgatgattttgttcgcgccgccaatatcatcctgcactgtgaaggcaaagtggtggttagcggaattggcaaaagcggccacattggtaagaaaatcgccgcaacgcttgccagtaccggcactccggctttttttgtccatccggcagaagcgctgcacggcgatctggggatgatcgaaagccgcgatgtgatgctgtttatctcttactccggtggcgcgaaggaactggatctgattattccgcgtctggaagataaatctatcgcgctgctggcgatgaccggcaaaccgacgagtccgctgggcctggcggcaaaagcggtgctggatatctccgtagaacgcgaagcctgcccgatgcaccttgcgccgacctccagcaccgtcaataccctgatgatgggtgacgcgctggcgatggcggtcatgcaggcgcgcggatttaatgaagaagattttgcccgctcccacccagccggggcactgggcgctcgcttgctgaataaagtgcatcatctgatgcgccgtgacgatgccatcccacaggtggcgttaaccgccagcgtgatggatgcgatgctggaactcagccgcaccggtctggggctggtggcggtatgtgacgctcaacaacaggtacaaggcgtctttaccgacggcgatttacgtcgctggctggttggcggcggcgcactcaccacgccagtcaatgaagcgatgacggtcggcggcaccacgttgcaaagccaaagtcgcgccatcgacgccaaagagatcctgatgaagcgcaaaatcactgccgcaccggtggtggatgaaaacggcaaactcaccggcgcaataaacctgcaggatttctatcaggccgggattatttaatccttcaatcccagacgtttcgccagccgatgcaggttggcgacgtcggtttccagcatccgcgcgcaggcagcccagttgtgatgattttgtgccagtgcctgacgaatagtttcacgctggaacgcttctgtcgcttcacgcaggttttgcttaacaacgggcaccgccgccacttctggcgtcggcaacgtcacctcaggaaaagcaaaatgttgcgcctcaagaatcacttcatcgccgctgcgggtggctctcgccagaactaccgcccgatgaatagcatgttccagttcgcgcacgtttcccggaaaactgtagtgttgcagtaaatttcgcgctccggcacttaataccacgcgggagagcccctgccgcaaacgacactgctcgcagaaataccccgccagcagaatgacatcatcgccccgctcacgcagcggcggcacgctaagtggaaacacgctcaggcgatgaaacaaatcggcgcggaatcgccctgccagcacctcttcgcgtaaatcgcggttagtcgccgccagcacgcgcacatcgacccgcaaacaacggtcatcgccaacgcgctgaatatcgccatactgcaacaccctcagcagcttggcctgcaatgccaagctcaactcgccgatctcatccagaaacagcgtgccgttatccgccatttcaaacttcccgctgcgattactgatagcgccagtaaacgctcctttcacatgcccgaacaactcactttccgccacactttccggcagtgcagcacagttgagatagaccagcggattcaccgcccgtgggctggcttcatgaatcgctttcgccaccagctccttaccggttccagtctcaccgctgatcaggacgttgagatcggacgccgccacaatctcaatctcttttttcagttgcgtcatgccaggggacaagccaatcatctgcgtctgtttcaccgcttcaaacggcgtggcatcgcctggcagcatattctggctttccagttgttcaatcagcaacgcattgcttaacgctcccgccgccagcgcagcaatcagccgtagctcttcgtcgctgaaaacatcgaactgatcgggctgcatcccgtcgagcgtcagtgcgccgatcaggttttgcccggcaaacaatggcagaccaacgcaggcgtgaaccttcagactctcctgcccaggaatcaaaccgtcatagggatcgggcaattcgctgtctgcgggaaagcgcaccacatccccggcgcgggcaatcgcttccagccgtggatgcccttccagcgcaaagcgtctaccgagtacatcctttgccagaccgtcgatggcaagcggaataaactgccggctatcgtaacgtagcaacgcagacgcatcgcactccagcacctgacgtagcgtggtgatcaggcgctgaaaacgatcctggtgaccaatcccacgctgcaattcgatggcgatattcgccagcacatcaacggaaaaactcatctttgcctcactgtcaatttgactatagatattgtcatatcgaccatttgattgatagtcattttgactactcattaatgggcataattttatttatagagtaaaaacaatcagataaaaaactggcacgcaatctgcaattagcaagacatctttttagaacacgctgaataaattgaggttgctatgtctattgtggtgaaaaataacattcattgggttggtcaacgtgactgggaagtgcgtgattttcacggcacggaatataaaacgctgcgcggcagcagctacaatagctacctcatccgcgaagaaaaaaacgtgctgatcgacaccgtcgaccataaattcagccgcgaatttgtgcagaacctgcgtaatgaaatcgatctggcggatatcgattacatcgtgattaaccatgcagaagaggaccacgctggggcgctgaccgaactgatggcacaaattcccgatacgccgatctactgtacagccaacgctatcgacagcataaatggtcatcaccatcatccggagtggaattttaatgtggtgaaaactggcgacacgctggatatcggcaacggcaaacagctcatttttgtcgaaacaccaatgctgcactggccggacagcatgatgacttacctgacaggcgacgcggtgctgttcagtaacgatgctttcggtcaacactactgcgacgagcatctgttcaacgatgaagtggatcagacggagcttttcgagcagtgccagcgttactacgccaatatcctgacgccgttcagccgcctggtaacaccgaaaattaccgagatcctgggctttaacttaccagtcgatatgatagccacttcccacggcgtggtatggcgcgataacccgacgcaaattgtcgagctgtacctgaaatgggcggctgattatcaggaagacagaatcaccattttctacgacaccatgagcaataacacccgcatgatggctgacgctatcgcccaggggattgcggaaaccgacccacgcgtggcggtgaaaattttcaacgtcgcccgaagcgataaaaacgaaatcctgactaatgtcttccgcagtaaaggcgtgctggtcggcactagcacgatgaataacgtgatgatgccgaaaatcgccgggctggtggaggagatgactggtttacgcttccgtaacaaacgcgccagtgctttcggctctcacggctggagcggcggtgcggtggatcgtctttccacgcgcctgcaggatgcgggtttcgaaatgagccttagcctgaaagcgaaatggcgaccagaccaggacgctctgaagttatgccgtgaacacggtcgcgaaatcgcccgtcagtgggcgctcgcgccgctgccgcagagcacggtgaatacggtagttaaagaagaaacctctgccaccacgacggctgacctcggcccacggatgcagtgcagcgtctgccagtggatttacgatccggcaaaaggcgagccaatgcaggacgttgcgccaggaacgccgtggagtgaagtcccggataacttcctctgcccggaatgctccctcggcaaagacgtctttgaagaactggcaagcgaggcaaaatgagtaacggcattgtgatcatcggtagcggcttcgccgcccgccaactggtgaaaaatattcgcaaacaggacgccactattccattaaccctgattgccgccgacagcatggatgagtacaacaaacctgacctcagccatgttatcagtcaggggcaacgtgccgatgaccttacccgccagacggcgggtgaatttgccgagcagtttaatctgcacctgtttccacaaacctgggtgacggatatcgatgccgaagcccgtgtggtgaaaagccagaataatcagtggcaatacgacaagctagtactggcaaccggtgccagtgcctttgtcccgcctgtgcctgggcgtgagttaatgctgacgttaaatagtcagcaagagtatcgcgcctgtgaaacgcaactgcgggatgcccgacgcgtgttgattgttggcggtggtttgattggtagcgaactggcgatggatttttgtcgtgcaggcaaagcggtcacgctaatcgacaacgctgccagtattctggcgagcttaatgccaccggaagtaagcagccgcttgcagcatcggttgacggagatgggcgttcatctgctgttgaaatctcagttacaggggctggaaaaaacggattctggcattcaggcaacgctggaccgccagcgcaatatcgaagtggatgcggtaattgccgccaccggactgcgcccggaaaccgccctggcacgacgcgccgggctgacgattaatcgcggcgtttgcgtcgatagttatctgcaaaccagtaataccgatatttacgcgctgggcgattgcgcggaaattaacggtcaggtattgccgttcctccagccgattcaacttagcgcgatggtgctggcaaaaaatcttctcggcaataacacgccgctgaaactcccggcgatgctggtgaaaatcaaaacgccggaattaccgctgcatctggcaggcgaaacccagcgtcaggatttacgctggcaaattaataccgaacgccagggaatggtggcgcgcggcgttgacgatgctgaccagcttcgcgcctttgtggtcagtgaggatcggatgaaagaggcatttggattgttgaaaacattgccgatgtaagtgggctactgtgcctaaaatgtcggatgcgacgctggcgcgtcttatccgacctacggggacgcatgtgtaggccggataaggcgtttacgccgcatccggcaatggtgtccaaatgcaacacgttttatccgttctggacttcacccgctaaccaacgcgccgcagcaataaccccctgccccagagacaaaccgccatcacccgccggtaaactctgtggaaagagcaatgtgaaatcagcgagataatgcgccagacgtgcacgcagcaaacggttatgaataaccccgccgctaaataccagcgtagtgataccacgcatcgtggcctgctcacgcatcaacgcggcaaaaccctgcgccagcgcatcatgaaacgcccacgcgcgttgattaaccggtgcctgccagttcagccactgctgccagaaagtggcgagatccagttgattgtccacccgcggcattgtcaccggatgcgtcactccgtggcaactggctgcgagcgcctccagagcacaagccgcttcaccttcataacttaacgtggctggcgcacagcccagtgccgccgccactgcatcgaaaaaacgcccacagctactcgccagcggcgcgttaattccacgctcaatggcccgcgccagcacgctccagttttgctgttgcacacttgctgtttcagagtaattctgccactccggcacaaagcgcaggcactgcgccagcaggtttcgccacggctgcttcgctgccaaatcgccacccggaagcgccactgcaggcaagccgcccaggtgctcacattcgcgatagttcacccgcaggcactcgccgccccacaaagcgccgttctcccccataccgataccgtcgagcgtcaaagcaatgacatcaccgccatccagcggccactgatgctctgccagacacgccgctgcatgggcatgatgatgcagtaccgtttgcgtcggcagattcatttcacgcgcccactggctggagacatagcccggatgcgcgtcatgcacaacgtattgcggggtaaaatcgtagatgttttgcatcaggcgtaacgcttcgcgccactgcatctggatgccatcgtcacttaaatcgcccagatgctgactcaacaccgcttgttcaccgcgcaccaggcagaaggtatttttcagatccgcgccgagacacagcacaggcggaacatttttaaagcccggaggcaaagccagcgcatccggcacatacccccggctacggcgcagcatttcgccgctttcgcgcaccacgctatcatccatccgctgcacgatgtcgcggttatgtatcaagaatccgtcggcaatgccctgcaaatccgccagcgcctgttcgttgctgatagctggtggtttaccgctcaggttgccggaggtcatcaccagcgggcattgcagttcctgtaacagcaaatgctggagcgggttcgcaggcaacattaccccgacttcgttaaggtcaggggcgatatcatcacaaagctcaggaacgtattttttatccaccagcacaatcggcgcggcgggcgtggtaagcaactggcgcgcagcgtctggtaaaccgtcagccactggcaacatgaccgccagcggtttcgccgggcgatgtttgcgcgcccgaagtgtcgccaccgcgttactgttacgtgcatcgcaggcaagatgaaatccgccaatccctttgatggcgacaattttgcccatttttaactgtgcgatagctgcctgtaatgccgcctcttgttccgcatgttcaccatgacttacccattcaagatgcgggccacactccgggcaggccaccggctgggcgtggaagcgacgatcgagcgggtcacggtactctttgtcacaggccggacatagcggaaacgccgccatcacggtaaacgggcggtcgtaaggcatggcgcgaataatggtgaaacgcgggccgcagtgggtacagttgataaacggataacgataacgccgttcgcctggggtattcatttcggcaaggcaagcagggcaagtagcggcatcgggaacaatttgcgtattcatggtgccgcctgtgctctggcgtatagtgaactcggtgggcagttgactccagataaacggctcacgctcgacgctatcaatacgcgccagcggcgggcagtgctgatacaattgaacaagaaacgtttccgggtcttcccgcagccggacttctacgccatcgccgtcattacagacatcgccgtgaagatttaattgctgtgccagctgccagacaaacggacgaaaaccgacgccctgcactttgccacgaatacgcagttggacaccgcaagatgtgttttttgccattgagttattcccgccatcatgaattgcgtaacccgccctgccggacacgacagcgtcgcatccggcagtcacaggtcggcgataccgcccgctccgtattctacgaatatttccgggaattcctttgatgccagaacagttctgtaagatttttagaacatcagcgccgtacggcggcgtttttctgcgctcagttgttcaagtttattacgatcgacacaaatcagcgcatgagtcgggcaagccgccatacacgccgggccgtcttcacgatggttgcacaggtcgcatttattggcttcggctttgtcagcccgtacattcagacccgcgccgctgttgcggatcaccggacgtaccaccacttccatcgcaccatacgggcaagccacaacgcaggttttgcaaccaatgcaacgttcctgcatcacatgaacaaaccctttatcacggctgatagcaccattcgggcagacgttagcgcacggtgcatcttcacactgacggcaaactgtcgccgtggaaatgttcacacctttaatgacatggatacgcggtaaaaaagtttccggggtcaggcttgcacagtcctgattttcctgatgagaaaccacgcacgctacttcacaggtacggcaaccaatacatttactcgcgtcagcaatgatgaaacggttcatcaaattctccagcaatgacagttaatgcgccgatacattcacaaatcatgccagtttttaatttactgttatttaaggaaattaatttctgtaatgcaggaaaaacgatgtcatcgacactagtgacgatgacatgtgatgacaatgtttatcggctaggagcaatgagactgtcgcggcggatcagttttccgctgaaggttttcggcggactgaaatccccgccatcgagcataaaaatcagccgtccaataatttcctgaatcatctcagtcaccggaatttttacgctggagagcgccggaacggtgtagggggcaatagcgatatcatcgaatccgataacactcacctgctctggcaccgctacgccgcgctcgtgtaacgctttcatcgcacctatcgccatatcgtcgttactggcaactaacgcgctaaatttagccccacgttcgagcaacatttctaccccttcggccccgctggcaggcgtccatttaccgttagcgataagtttttcattgagcgcaataccatgctgcgccagcgcgtctttatacccggcaagacgttcaatgctggtgggggaatccatgctgccggtaaggaaagcaatctcctgatgcccggcgtttatcaactctgccacggcgttaaaactggtctgtttatgatcgcaccagacgctatggctgctgtttttgcgcaggcggcgattaagcaccattatcggctgactgtgcgcgtcaatgatgtcatcgatctcatccacgcttaaaaaacgcgggtaaatcatgatcgcgtcgcagcgcagatccagcagatactgaatcgcctggcgctcttcttctgcgctgtgtttaccatctgccaatagcaactgccgccctttctcttccgccattcgcgcggcatgaaagagtaattcactaaaataaatgccgtggtaaagcgtgttggtcactaccagccccagcgtctgagtactcttcgcgctcagattgcgcgccagcaagtttggacggtaaccgctctcttctaccgcctgaaacacgcgatctttagtctcctggctgacgtagccattaccactaagcacgcgggaaacggtcgctttactaaccccggcgcgcttcgccacttccagcatcgtcgtcatcattttcatccctttacacgcaatcaacgcagtgtactgcaccgtttgccgattgtccttgcacaatcggcgggaaaaatattcaggtgaccggtttcacaaatataaaaaatgaacaattcactctcttgcttatttagtgacaactattcatgattttgtgaaaccggtttcttaattccgtttcagcatcggcatttttccgtcacgtcgactgataacaactacatctaccctactgataacaggataaaatccgatggccaaaaattatgcggcgctggcacgcagcgtgatagcggcactgggcggcgttgataacatcagcgcggtcacgcactgtatgacgcggttgcgctttgttatcaaagatgatgcacttatcgacagcccgacgttaaaaaccatccccggcgtgctcggcgtggtacgtagtgacaaccagtgtcaggtgattatcggcaataccgttagtcaagcctttcaggaagtcgtcagcctgctgccgggagatatgcagcccgcacagcccgtgggtaaacccaaactcacgctacgtcgcattggtgcggggatcctcgatgcgctgatcggcaccatgagtccgctgatcccggcgattatcggcggaagcatggtcaaactgctggcaatgatcctcgagatgagcggcgtgctgacaaaaggaagcccgaccttaaccattctgaatgtgattggtgacggtgctttcttcttcctgccgctgatggtcgcggcatctgccgccatcaaatttaaaaccaatatgagcctggcgattgccatcgcgggtgtgctggtacatccgagttttattgaactgatggcgaaagcggcccagggtgaacatgtcgaatttgccctgattccggtcaccgcggtgaaatacacctacacggtgatcccggcgctggtgatgacctggtgcctgagttatatcgaacgctgggtggacagcattacaccggcggtgaccaaaaacttcctcaaaccaatgctgattgtgttgattgccgcaccgctggcaatcctgctgattggcccgattggtatctggatcggtagcgccattagcgcgctggtttacaccattcatggttatctgggctggcttagtgtcgccattatgggcgcgctgtggcctctgctggtaatgaccgggatgcaccgcgtctttacgccaaccatcattcagaccattgccgaaaccggcaaagaagggatggtcatgccgagtgagatcggcgctaacctgagcctgggcggtagtagtctggcagtggcgtggaaaacgaaaaacccggaactgcgtcagacggcgctggctgcggcggcaagtgccattatggcggggatttccgaaccggcgttatatggcgtggcgatccgcctgaaacgtccgcttatcgccagtcttatcagcggttttatttgcggcgcggttgccggtatggcggggcttgccagccacagtatggcagcgccggggctatttaccagcgtgcagttcttcgatccggcgaatccaatgagcatcgtctgggtgttcgcggtcatggcgctggcggtggtgctgagctttatcctcacactgttgctcggctttgaggatattcctgttgaggaagcggctgcccaggcgcgaaagtatcagagcgtacaaccgaccgtcgccaaagaagtaagtcttaattgaggatgaaaatgagtgtatttccagaaagttttttatggggcggcgcgcttgccgccaaccagtctgaaggtgcgttccgtgaaggtgacaaaggtctgaccactgtcgatatgatcccacacggcgagcatcgaatggcggtgaaactggggctggaaaaacgttttcagttgcgagatgacgagttttatcccagccatgaggcgacggatttttatcatcgttataaagaagatatcgccctgatggcagagatgggattcaaggttttccgtaccagtattgcctggagccgtctctttccgcagggcgatgaaatcacgcccaatcagcagggcattgctttttatcgttctgtctttgaagagtgtaaaaagtacggtatcgaaccgctggtcacgttgtgccacttcgatgtgccgatgcatctggtcaccgaatatggctcctggcgtaaccgcaagctggtggagtttttcagccgctacgccagaacctgctttgaagcatttgatggtctggtgaaatactggctaaccttcaatgaaatcaacattatgttgcatagcccgttctccggcgcgggtctggtgtttgaagaaggtgaaaatcaggatcaggtgaaatatcaggccgcgcatcaccagctggttgccagtgcgctagccaccaaaatcgcccatgaggttaacccgcaaaatcaggtgggctgtatgctggcgggcggtaacttctacccttacagttgcaagccggaagatgtctgggcggcgctggagaaagaccgggaaaacctgttttttatcgatgtgcaggcgcggggcacgtatccggcttactctgcccgcgtattccgcgaaaaaggggtaaccatcaacaaagcaccgggcgatgatgaaatcctgaaaaacaccgtcgattttgtctctttcagctattacgccagccgctgcgccagcgcggagatgaacgccaacaacagcagtgcggcgaacgtggtgaaaagcctgcgtaatccgtatctacaggtgagcgactggggctggggaattgatccactcggtctgcgtatcaccatgaatatgatgtacgatcgttatcagaagccgctgtttctggtggaaaacggcctgggcgcaaaagatgaatttgctgccaatggcgagattaacgacgactatcgcatcagctacttacgcgaacatatccgcgcaatgggcgaagcgattgcagacggcattccgctgatgggctacaccacatggggctgtattgatttagtttccgcctctacgggtgaaatgagcaaacgctacggctttgtctttgttgaccgtgacgacgcaggcaacggtacgctgacgcgcacgcgtaagaaaagtttctggtggtataaaaaagtgattgccagtaatggggaagatttagagtaagtaacagtgccggatgcggcgtgaacgccttatccggcctacatgtcgcacgaaccatgaaggcccgataagcgcagcgcatcgggcaatttagcatttggcatcagagctggttcaccccatcaagaacatccctgtcctgattccttaatgaaaaattactcttcttccaccgctaactgcgcgaagccgccatttccttcccagccttccagtcgttgataaacggtttctaccgcatctttaatcggctgggtcatcgggtagtaaaagccgacgatatccggctgaatgccgaggaaaatcacttcgccaatatcttctttcaactggtcgataaggtaattcaacggcatgttatgggtagtcatcataaacatctcggcgatatcatccgggtcgatgatgcggatctcgccggggtttagccccatatccgtggcgtcgacaatcagcagtcgtgtcgggcgcagttcacggatagcgacgatgtcgttttccggtgcgctaccgccgtcaatcaccacccagttacctttcggcgcggcggcgcacttttccgccagcagcggacctgcgccatcatcgcccatcatgctattgccaacacagagtaaaacgtcagtcacgcagtctcctcaccatcaaatagatggcgttttcctgatgaatatcatgcagcatacttaacagcattgtactccattcctgctgctggctagtttgcgctgcccgggctttatcgaatgcgttggccagcatcggcacatggttaatgtcgatgacgatctcaccatatttcggcacgccttccattttgcggcgggcttcactgcctgcctccagagtggcaatccatgccagatattcatcccacgggcaggtgagcgccgcttccaggcaatcgataaccccaaggtggtgaccaatcgccaggctgtaatagaccacctgctgcgcctcggcgggcgtggcatcgttctcatcaataaatttatggctcagttgactgaacaccaccttttcactcatcggatacgcgcctcttcaacaacatgattcagatggctgacaatctcgttcagacgcggatcgttttccgcttccagccagcgtgcaacctgttcttcgccctgccctaactgtgtaaggtaatcatcggcaatctgacgaccgtaacgataacccgccaggcgacgtgcttcgcgatccactttcacgcgcagcggctgcaccatatcaccatgcaggatctccgccggttgttcatccagttcacccggcccacgggcgtgaattttctgctccagcaggccgagcgccattgcaaagccgtacagcgtggcggcaggcgttggcgggcagccagggatataaacatccacagggacaattttatccgtaccgccccacacgcagtagagatcgtggaagatcccgccactgttaccgcaggcaccgtaggagatacaaattttcgggtccggcgcggactgccacgcacgcagcgcaggggatcgcattgcacgggtgaccgcgccggtaaacagtaaaatatccgcatgacgcggactaggaacgactttaatgccgaagcgttctgcatcaaacagcgggctaagcgtggcgaaaatttcgatttcgcaaccgttgcagccgccgcagtccacgcggtaaacataggcagaacgtttgatttttttcagtaagctcgccttcatgctggcgatggattcatccaccgtcatggggaccggaatgccgttggcgtcacgggggcctaataaattgctcatcagatggcctctttcatatggcgagtcagttcaatacggtcggacggcaccaggcatttctggcgcttacattccgggcaagtctcaaagctttcgcggtggttttccgcgcggctgtcgccgttgtgcttaagcagcgcaatggcgtagtcgatctctttctggacggcgaaaggacgattgcagacgcggcagttgcacagcgcgaagcgggactgttgcaggaagtcttctttcttccacaccgccagttcgtactcttggctcagtttgatcgccgccgtcgggcagacttcttcgcagcgtccacagaagatgcagtgcccaagattaaactcccaggcaagctctcctgtggcgaggtcagtttcaaccgttaaggcgttactcgggcaggcattgacgcaggccgcgcagccgatgcactgctgcgggttctgctctggcttaccacggaagtttttatcaaccgcaatcggctccagcggataagagctggtcgccgtgccggttttgatgacttttttgataaaggtaaacatggcgattccttatttcagcgggctgtttttacgctcaatgctgtaacgctcgagttctttgtacggcaccactttgctcttcttcttacgcacatcgaccacggtcatgcggtcggtacaggagtagcaagggtcgaggctaccgataatcagcggcgcatcggaaacggtgttgccgcgcagcatgtagcgcagggtcggccagttcgcgtaggtcgcggcacggcagcgccagcggtacagcttctggttgtcgccggtcatgctccagtggatatcatcgccgcgcggcgcttcggcaaagcccagcgcaaagcggtgcggaatgtaggtaaagccttccaccatcagtgggccacccggcaggttatccagaccgtagtcgatcatgttcagcgcggtatagacttcgttgatacgcactttcagacgggaaataacgtcgcagccctgctcgctgtggacttccattggcagcaggccatagccgacaaacgggtgatcggcgcgggtatcacgggcgtgaccgctggcacggaccatcgggccgacgttactgaagtcgcgagcgatttccgggtccagacgaccaatgccgacagtgcgctgttccatgttcggagtgctcagcagcacatccaccagctcctgcacttcacgacgcatctgttgtgccagctggcgggtctggatcatgtcgtctttcagcagatcgcgacgaatcccgccgatcaagttcaggccgtaggttttacgcgcaccggtaaggatctctgccattttcatggaggtttcacgcacgcggaagaactgcataaagccggagtcgaagccggtaaagtgacaggccaggccaaggttgagcagatggctgtgcaagcgttctacctccagcagaatggcgcggatcatctgcgcacgttctggcacctgaatacccatcgcgttttccacgctcgtggtgtaggcggtgctgtgggcaaagccgcagatcccgcacacacggtcagagaggaaggtcacttcgttataacccatacgggtttccgccagtttttccatgccgcgatggacgtagaacagacggtagtcggcgtcgataatgttttcgccatcgacgaacagacggaagtggcccggttcatcagaagtgacgtgcagcggaccaatcggcacgacgttgtttttcttgtcgcccagttcgttgatgaactcgtaggtttcagcatcggtggtcggtgccggacgctgacgataatccatgctgtctttacgcagcggataaagttcatccggccagtcatccggcagcaccagacgacgttcatccggcagaccaaccggaatcaaaccgtacatatcgcgcacttcacgctcgccccacaccgccgccggaacgcgcggcgtcacggacggatattccggtttgttggcgtcaacttcgacgcgaaccgtaatccaacacttagtgcccttctccatgctcagcacgtagtaaacggcgtaatgaccattcagtttgcgttcgtcgttaccaaacagcacgctcagccagccaccctgtttgtagtaaagaaactccaccacttccggcaggtagttcacctttacggtgacagtcagctgatctttggtctgccaggcgtggtccagcacgacgcccggaaatgcctcattcagcgcggcgagataatgttgacctaatttttcttcagacatgctcaaactctctttaatcacgccgccagcaaggagacgaacgctaaaaatgcaaagccaaacccagcccaggtaatgcgcggagtaatatcaagacgcagacgggccatgctgttttcgaacagcgcgataaccaggacgccgaccaccagttttacgatggcaatcaccagcgccagcagcagtccaccggcggtgaaggtttccatttgtccccacggaataaacaccccgacgaacatctgcaacaccaccagctgtttcaggctgataccccatttcatgacgccaaagccgctgccgctgtattcagagagcgggccttcctgcagctcctgctcggcttccgccaggtcgaacggcagtttgcccatttcgataaaggtggcgaacgcacaggcacaaagcgccagtaccagcgggatgctctggctcagcggccagtgataaacggtgtcggtgatgttgctgatgttggtggaaccggcaacctgtgcggcaacccacagaccaagcagcagcatcggttcgaccagcacgccaagcatcgcttcacggctcgcgccgatagcggtaaacgggctaccggtatccagaccagaaatggcaaagaagaaacgcgcgatggcaaagagatacagtaaggtgatcaaatcacccagttgcggcagcggagaaccgacggtcaccaccggcagcgcagtagcgatagtcagcatgacgcccaccatcacatacggcgtcaggcggaacacccagccggaggcatccgggccgacgctctgacgccccagcagtttgataatgtcgcgatactcctgcaacacgcccggcccgcgacggttatgcaagcgggcgcgcgccacgcgggttataccggagagcagcggcgcaacggcaaataacaccagcgcctgaattaacggatataaaacactcattctcaggctcctcgactaacaataatcaccaccagtaccgccagttcaaccagcgccatccggcggaacagcaacgcactcccctcgcactgccagcccggcaccagagacaccggattcagccatttgcgtagtttcagcaccggcgcaaacgcctgtttcaccggcatggcaaaaccgtgagcggtaatcaccatacttttttcgtggtcgtaaccgcacacccaggccgcaccgcgggaacggcttggcaaacgatcgcctttgcaaatcgccataatgatgaatggcagcagcgggcaggcaatcagcagcaacgtgatcatcggttgagaaacggtggtgttagcaggctccagcggcagaggtacagcagcagagagcatcggcagtagccacggcgcagcaacaccgccaattacgcagcaaatcgccagtgccactacgcttacgctcatcaggagcggcgcacaggtggcgttttcggcttctttggtgcgcggcgcgccgaggaacgtgacgccatagactttcgccatacacatcaccgccagcgcaccggtaattgccagccccacagcgagcagcggccccagcagacgggcaacaaacgcgccactattgctcagtttgaaaaaactttgatagataacccattccccggcaaaaccattcagcggcggcagcgcagccattgccatcagcccgactaacatggcgatggagataaccggcattttcttgccaataccaccgagtttttcgatatcgcgatgaccggtacggaaccagacgctccccgccccgaggaacagtacgcttttgaacaggctatggttaagcagatggtacagaccaccgaccaggccaagagcaatcagcgccggttgttcgagcgcgatacccgttacgccagcgcccagccccagcaggatgatgccgatattttccagggtgtggtaagccagcaggcgctggatgttgtgctccaccagcgcatacagaccaccgacaaacgcggtgatcatgccgagcaccagcagcgcgatcccccaccacagcggtgcattaccgcccagcagactcagggttaaaatgcccagcaggccaattttcatgactaccgtagaaaacaacgcggcagctggcgcagaggcgttcgcatgtgcctgcggcacccagccgtgcagcggaataatcccggccagcaggccaaagccaatcactccgagcagccagatatcggaaccgagcggcagctgttgcatacgcatatccagcaggcgcagatccagcgtgccgtaacgctgccacagcagccagcaagcaatcgccagcagcagagtgccaagacgccccagcgcaaaccacagtttgccctctttgctgttgctggtgaggaacaccgcgcacagggccatgatttcggccattaccacgaacatgccgaggttgctggcaatgacggcgcagacggcggcagccatcaacatattgatctgcaagccgttgcacttcacctgcgcgtggcgatgccagtcaatgttgtagaggctgacaaacagaccgcacagaccgagcgtaatcagccaaatcgcgttaagcggagagatttgcacatcgtagcttaccaggctcagcgcaccgctcacgccaaccgcgccagtcagtacagtgaagcccgcggctgccgtatacagactaccaaccgcgccgccaattccagctatccagccacttaacgctttttgaaaagaaaagagaaatgccagaacagcggcggcgacaaaccacgccacgccgctattgatcagggaaattgcgctcatttagcctctccactttgagcctgctgaaacaaggtgagatcgccaaagtccgtgttaaaggtcagctcacgcttacgtttgctgacgcgggcgatatcggtgttatccaccagatgcagggctttagtcgggcacatccgcacgcaggccggaccttgttcatcaaagctacaaaggtcacatttgacggcgatcgcgcgaatacctggcacccagtcaagcaatgtgctgacacgcgccggagcaggcggtgccggtggcgctttcggggtattggcgtttgccggaatatccagcggacggctgccggaaaattcaattgcgccaaacgggcaggcgatgccgcacagcttgcagcttacgcacaggctttcattcaactgcacggccccatcgacgcgggtgatggcgttaaccgggcagaccaccgcgcagggtgcatcttcacagtggtgacagagctgcggcgcagattctttttcattcagcatcactctcaggcgcggcatactttgcaggccgtgctggcgatgcgtctcactacaggcggcctcacaagtgtggcagccgatacagagcgtggagtcagcaattacaaaacgattcaccaggcattcctcaggtgattgtcatttttgacgaaaacatgccgatgaaatgtcattttcgacactcatcgacacgcccatccccaaacaggcgtaacgcctgcaaaacgggcaaagcctcagctcatgctgccgggctttgtccctttaccagttggcttaaattcaccggcacattgttttcaatagcggtgtataagctgtcgtaaacgccagcgattttttcgagatagtgttccagaacctgttcgcgatcgcggatgttgaccttgccatcaatcatgccgtcaatgctcagttgcgcctgcgcaatccgctgtttgtcttcgccatcttttgtttcgacgtaatactcgatggtgtggctgttaaagccatccgccagggtgacgtaaatgcgaaaatgttcaaaaaggacgaaacagagttctttgtccggcgcgcagctcatggcgtgatgcaggcgcgctttgcttaacgtgatcccctgaaccaggctattgcagtagatgtgccactggtcctgtaggcgacgatgccgctgtgcgatgtaatcggctttctcgcttatttcccaaatagtcattgtcaggttacccgtttaacagagatgccagctttaagcattttttgtgccaacttttaatttattgttattaaagagatttttaagctaaagatgaatttcgtcgccgtgtcgacgtgtcatttcgacatcatcgacattattcaccgcagggataatcaacactggcacaattattgcttgtagctggcaatagttaatgggaggcgatatgcacgaaataaccctctgccaacgggcactggaattgatcgaacagcaggccgcaaaacacggcgcaaaacgcgtaactggggtctggctcaaaattggcgcattttcttgtgtcgaaaccagctctcttgccttttgttttgatctggtttgccgcggcagcgtggcggaaggttgtaaactgcacctcgaagaacaagaggccgaatgctggtgtgaaacatgccaacagtatgtgacgctactgacccagcgcgtccgccgctgtccacagtgtcatggtgacatgctgcagattgtggcagacgacggtttacagattcggcggatagaaatagaccaggagtgagcgatgtgtacaacatgcggttgcggtgaaggcaacctgtatatcgagggtgatgaacataaccctcattccgcgtttcgtagcgcgccatttgccccggcggcacgcccgaagatgaaaatcaccggcattaaagcgcctgaatttacccccagccagactgaagaaggcgacctgcattacggtcatggcgaagcgggcactcacgcaccgggcatgagccagcgtcggatgctggaagtcgaaattgacgtgctggacaaaaataaccgtctggctgaacgcaaccgcgcgcgctttgctgcccgcaagcaactggtgctcaacctggtttccagccctggttccggtaaaaccaccctgctgacggaaaccctaatgcgcctgaaagacagcgttccgtgcgcagttattgaaggcgaccagcaaaccgtgaacgatgccgcacgcattcgcgctaccggcacaccagcgattcaggtgaacaccggtaaaggctgccatcttgacgcacagatgattgccgacgccgcaccgcgtctgccactggacgataacggtattctgtttatcgaaaacgttggcaacctcgtatgcccggccagcttcgatctcggtgaaaaacacaaagtggcggtgctttccgttaccgaaggtgaagacaaaccactgaaatatccgcatatgtttgccgccgccagcctgatgctgctcaacaaagttgacctgttgccgtatctcaactttgacgttgaaaagtgcatcgcctgcgcccgcgaagtcaatccagaaattgaaatcatccttatttccgccaccagcggcgaagggatggaccagtggctgaactggctggagacacagcgatgtgcataaggtaaaactggctggagacacagcgatgtgcataggcgttcccggccagatccgcaccattgacggcaaccaggcgaaagtcgacgtctgcggcattcagcgcgatgtcgatttaacgttagtcggcagctgcgatgaaaacggtcagccgcgcgtgggccagtgggtactggtacacgttggctttgccatgagcgtaattaatgaagccgaagcacgcgacactctcgacgccttacaaaacatgtttgacgttgagccggatgtcggcgcgctgttgtatggcgaggaaaaataatgcgttttgttgatgaatatcgcgcgccggaacaggtgatgcagttaattgagcatctgcgcgaacgtgctagtcatctctcttacaccgccgaacgccctctgcggattatggaagtgtgtggcggtcatacccacgctatctttaaattcggcctcgaccagttactgccggaaaacgttgagtttatccacggtccggggtgcccggtgtgcgtactgccgatgggtagaatcgacacctgcgtggagattgccagccatccggaagtcatcttctgtacctttggcgacgccatgcgcgtgccggggaaacagggaagcctgttgcaggcaaaagcacgcggtgccgatgtgcgcatcgtttacagcccgatggatgcgttgaaactggcgcaggagaatccaacccgcaaagtggtgttcttcggcttaggttttgaaaccactatgccgaccaccgctatcactctgcaacaggcgaaagcgcgtgatgtgcagaatttttacttcttctgccagcacattacgcttatcccgacgttgcgcagtttgctggaacagccggataacggtatcgatgcgttcctcgcgccgggtcacgtcagtatggttatcggcaccgacgcctataattttatcgccagcgattttcatcgtccgctggtggttgctggattcgaaccccttgatctactacaaggcgtggtcatgctggtgcagcagaaaatagcggcccacagcaaggtagagaatcagtatcgtcgagtggtaccggatgccggtaacctgctggcgcaacaggcgattgccgatgtgttctgtgtcaacggcgacagcgaatggcgcggcttaggcgtgattgaatcttctggcgtgcacctgacgccggattatcaacgattcgatgccgaagcacatttccgcccggcaccgcagcaggtctgcgatgacccgcgcgcgcgttgtggtgaggtattaacgggcaaatgtaagccgcatcaatgcccgctgtttggtaacacctgtaatcctcaaaccgcgtttggtgcgctgatggtttcctccgaaggagcgtgcgccgcgtggtatcagtatcgtcagcaggagagtgaagcgtgaataatatccaactcgcccacggtagcggcggccaggcgatgcagcaattaatcaacagcctgtttatggaagcctttgccaacccgtggctggcagagcaggaagatcaggcacgtcttgatctggcgcagctggtagcggaaggcgaccgtctggcgttctccaccgacagttacgttattgacccgctgttcttccctggcggtaatatcggcaagctggcgatttgcggcacagccaatgacgttgcggtcagtggcgctattccgcgctatctctcctgtggctttatcctcgaagaaggattgccgatggagacactgaaagccgtagtgaccagcatggcagaaaccgcccgcgcggcaggcattgccatcgttactggcgatactaaagtggtgcagcgcggcgcggtagataaactgtttatcaacaccgctggcatgggcgcaattccggcgaatattcactggggcgcacagacgctaaccgcaggcgatgtattgctggtgagcggtacactcggcgaccacggggcgactatccttaacctgcgtgagcagctggggctggatggcgaactggtcagcgactgcgcggtgctgacgccgcttattcagacgctgcgtgacattcccggcgtgaaagcgctgcgtgatgccacccgtggtggtgtaaacgcggtggttcatgagttcgcggcagcctgcggttgtggtattgaacttagtgaagcggcactgcctgttaaacctgccgtgcgtggcgtttgcgaattgctgggactggacgccctgaactttgccaacgaaggcaaactagtaatagctgttgaacgcaacgcggcagagcaagtgctggcagcgttacattcccatccactggggaaagacgcggcgctgattggtgaagtggtggaacgtaaaggtgttcgtcttgccggtctgtatggcgtgaaacgaaccctcgatttaccacacgccgaaccgcttccgcgtatatgctaataaaattctaaatctcctatagttagtcaatgaccttttgcaccgctttgcggtgctttcctggaagaacaaaatgagttatacaccgatgagtgatctcggacaacaagggttgttcgacatcactcggacactattgcagcagcccgatctggccagcctgtgtgaggctcttagccaactggtaaagcgttctgcgctcgccgacaacgcggctattgtgttgtggcaagcgcagactcaacgtgcgtcttattacgcgagccgtgaaaaagacacccccattaaatatgaagacgaaactgttctggcacacggtccggtacgcagcattttgagccgccctgatacgctgcattgcagttacgaagaattttgtgaaacctggccgcagctggacgcaggtgggctatacccaaaatttggtcactattgcctgatgccactggcggcggaagggcatatttttggtggctgtgaatttattcgttatgacgatcgcccctggagcgaaaaagagttcaatcgtctgcaaacatttacgcagatcgtttctgtcgtcaccgaacaaatccagagccgcgtcgttaacaatgtcgactatgagttgttatgccgggaacgcgataacttccgcatcctggtcgccatcaccaacgcggtgctttcccgcctggatatggacgaactggtcagcgaagtcgccaaagaaatccattactatttcgacattgacgatatcagtatcgtcttacgcagccaccgtaaaaacaaactcaacatctactccactcactatcttgataaacagcatcccgcccacgaacagagcgaagtcgatgaagccggaaccctcaccgaacgcgtgttcaaaagtaaagagatgctgctgatcaatctccacgagcgggacgatttagccccctatgaacgcatgttgttcgacacctggggcaaccagattcaaaccttgtgcctgttaccgctgatgtctggcgacaccatgctgggcgtgctgaaactggcgcaatgcgaagagaaagtgtttaccactaccaatctgaatttactgcgccagattgccgaacgtgtggcaatcgctgtcgataacgccctcgcctatcaggaaatccatcgtctgaaagaacggctggttgatgaaaacctcgccctgaccgagcagctcaacaatgttgatagtgaatttggcgagattattggccgcagcgaagccatgtacagcgtgcttaaacaagttgaaatggtggcgcaaagtgacagtaccgtgctgatcctcggtgaaactggcacgggtaaagagctgattgcccgtgcgatccataatctcagtgggcgtaataatcgccgcatggtcaaaatgaactgcgcggcgatgcctgccggattgctggaaagcgatctgtttggtcatgagcgtggggcttttaccggtgccagcgcccagcgtatcggtcgttttgaactggcggataaaagctccctgttcctcgacgaagtgggcgatatgccactggagttacagccgaagttgctgcgtgtattgcaggaacaggagtttgaacgtctcggcagcaacaaaatcattcagacggacgtgcgtctaatcgccgcgactaaccgcgatctgaaaaaaatggtcgccgaccgtgagttccgtagcgatctctattaccgcctgaacgtattcccgattcacctgccgccactacgcgagcgtccggaagatattccgctgctggcgaaagcctttaccttcaaaattgcccgtcgtctggggcgcaatatcgacagcattcctgccgagacgctgcgcaccttgagcaacatggagtggccgggtaacgtacgcgaactggaaaacgtcattgagcgcgcggtattgctaacacgcggtaacgtgctgcagctgagtttgccagatattgttttaccggaacctgaaacgccgcctgccgcaacggttgtcgccctggagggcgaagatgaatatcagttgattgtgcgcgtgctgaaagaaaccaacggcgtggttgccgggcctaaaggcgctgcgcaacgtctggggctgaaacgcacgaccctgctgagtcggatgaagcggctgggaattgataaaagcgcattgatttaactgcaaattgccggacagatctgcctgtccggcatattattcatgaggttttttcggacgatatttttccggcagttctggcaccggacgcttgtcatcgatgagatgacgcacggttaagatcggatgacgccacagcattctcggcccggcccaacgcataatctgtttcatctcttcacgctttgcaggctggtaacagtgcaccggacactgcttacaggctggtttctcttcgccgaacacacatttatccagccgcttttgcgcgtaaacaaacaacgcctcgtaatgctccggctccgcactcgcctgcgggcatttcgcttgataaagatcgatcatttttttaatcgtcagtttttcacgagagatacgcttgccggacatgctgcctccacctcattaagatgtatttatattacatcttaatcttaaagggcactatgactccaaagaagaagggttagccaaccgatacaattttgcgtacttgcttcataagcatcacgcaaaagctgcaaaacagcatctttcccggaaccagcatcaagaactcgccgttcgcttcttcccctgaaatgattaactccggtatcatgtgcgccttatgtgattacaacgaaaataaaaaccatcacaccccatttaatatcagggaaccggacataaccccatgagtgcaatagaaaatttcgacgcccatacgcccatgatgcagcagtatctcaggctgaaagcccagcatcccgagatcctgctgttttaccggatgggtgatttttatgaactgttttatgacgacgcaaaacgcgcgagccaactgctggatattagtctgaccaaacgcggtgctagcgcgggagagccgatcccgatggcggggattccctaccatgcggtggaaaactatctcgccaaactggtgaatcagggagagtccgttgccatctgcgaacaaattggcgatccggcgaccagcaaaggtccggttgagcgcaaagttgtgcgtatcgttacgccaggcaccatcagcgatgaagccctgttgcaggagcgtcaggacaacctgctggcggctatctggcaggacagcaaaggtttcggctacgcgacgctggatatcagttccgggcgttttcgcctgagcgaaccggctgaccgcgaaacgatggcggcagaactgcaacgcactaatcctgcggaactgctgtatgcagaagattttgctgaaatgagcttaattgaaggccgtcgcggcctgcgccgtcgcccgctgtgggagtttgaaatcgacaccgcgcgccagcagttgaatctgcaatttgggacccgcgatctggtcggttttggcgtcgagaacgcgccgcgcggactttgtgctgccggttgtctgttgcagtatgcgaaagatacccaacgtacgactctgccgcatattcgttccatcaccatggaacgtgagcaggacagcatcattatggatgccgcgacgcgtcgtaatctggaaatcacccagaacctggcgggtggtgcggaaaatacgctggcttctgtgctcgactgcaccgtcacgccgatgggcagccgtatgctgaaacgctggctgcatatgccagtgcgcgatacccgcgtgttgcttgagcgccagcaaactattggcgcattgcaggatttcaccgccgggctacagccggtactgcgtcaggtcggcgacctggaacgtattctggcacgtctggctttacgaactgctcgcccacgcgatctggcccgtatgcgccacgctttccagcaactgccggagctgcgtgcgcagttagaaactgtcgatagtgcaccggtacaggcgctacgtgagaagatgggcgagtttgccgagctgcgcgatctgctggagcgagcaatcatcgacacaccgccggtgctggtacgcgacggtggtgttatcgcaagcggctataacgaagagctggatgagtggcgcgcgctggctgacggcgcgaccgattatctggagcgtctggaagtccgcgagcgtgaacgtaccggcctggacacgctgaaagttggctttaatgcggtgcacggctactacattcaaatcagccgtgggcaaagccatctggcacccatcaactacatgcgtcgccagacgctgaaaaacgccgagcgctacatcattccagagctaaaagagtacgaagataaagttctcaccagtaaaggcaaagcactggcactggaaaaacagctttatgaagagctgttcgacctgctgttgccgcatctggaagcgttgcaacagagcgcgagcgcgctggcggaactcgacgtgctggttaacctggcggaacgggcctataccctgaactacacctgcccgaccttcattgataaaccgggcattcgcattaccgaaggtcgccatccggtagttgaacaagtactgaatgagccatttatcgccaacccgctgaatctgagcccgcagcgccgcatgttgatcatcaccggtccgaacatgggcggtaaaagtacctatatgcgccagaccgcactgattgcgctgatggcctacatcggcagctatgtaccggcacaaaaagtcgagattggacctatcgatcgcatctttacccgcgtaggcgcggcagatgacctggcgtccgggcgcagtacctttatggtggagatgactgaaaccgccaatattttacataacgccaccgaatacagtctggtgttaatggatgagatcgggcgtggaacgtccacctacgatggtctgagcctggcgtgggcgtgcgaggaaaatctggcgaataagattaaggcattgacgttatttgctacccactatttcgagctgacccagttaccggagaaaatggaaggcgtcgctaacgtgcatctcgatgcactggagcacggcgacaccattgcctttatgcacagcgtgcaggatggcgcggcgagcaaaagctacggcctggcggttgcagctctggcaggcgtgccaaaagaggttattaagcgcgcacggcaaaagctgcgtgagctggaaagcattagcccgaacgccgccgctacgcaagtggatggtacgcaaatgtctttgctgagtgtaccagaagaaactagccctgcggtcgaagctctggaaaatcttgatccggatagtctcaccccgcgtcaggcgctggagtggatttatcgcttgaagagcctggtgtaataacaattcccgatagtcttttgctatcgggaatattaacgacaactgacgaataaaataaaaacaccctgtataataggaaagcttattttacagggtaaaaccatgccatctacacgctatcaaaaaatcaatgcccatcactatcgccatatatgggtcgttggtgatattcatggtgaatatcagttattacaatcccgcttacatcaactctcttttttccccaaaatcgacttacttatttctgtcggcgataatattgatcgtggaccggagagtcttgacgtcctgcgcctgctaaaccaaccctggtttacgagcgttaaaggcaaccacgaagcgatggcgcttgaggcattcgaaactggcgatggcaatatgtggcttgccagcggtggtgactggtttttcgatttaaatgatagtgagcaacaagaggcaatagatctgttgctgaaattccatcaccttccacatattattgaaatcactaacgacaacataaaatatgccatcgcacatgcagattatccggggagtgaatatctctttggtaaagaaatagcggagagcgaattactctggcctgttgatcgtgtgcagaaaagccttaatggcgagttacaacaaataaacggcgctgattattttatatttggacatatgatgtttgataacattcagacgttcgctaaccagatttatattgataccggaagcccgaacagcgggcggctgagtttttataaaataaagtaatctcatgcttcttctgtgaagcatgagtaacccggtgttattgcaggccattattcatttttcgctaccagcaaagagagatcctgcttcaccagcgcgcgactggcactctccggcaaaccgtcgtctgtaataatctgatcaaactcgcttaatggtaacgccagccatgtcgccacctgaccatatttcgtcgcatcacagaccaaaactcgctggcggctggcactggcaatcgcccgtttcaccgtgactttatcttccgctggcgtagaaatcccccgcacactccaactgcttgcagaaataaaagcctgatcaatcatcaggctgcgcagcatggtcgcagcggcttccccgacacaggaacggttttcccgacacactgcaccgccagtgtgaataattgtgcaattactgttgtcgagcaagtagtccgcaataacgaaatcgtttgtgaccacagtcagactctccatgtgaatcagatgctgtgctatcgctaacgtggtcgttcccgcatccagatagatacaacttcccggctgaacaagacttgccgccagcttgccaatagccgctttttgcgtcattgccagcgcagtttttacctgatgagaaggttcatgcgccacgcgtcccggagactggacgcctccggacaccagcacaacggctccctgctgctccagtttttgtaaatcccgacgaatggtcatatgactcacattcattctgtccgttagttcagcaatactgacaatgcctttttcagctaccatctcaaggatgatttggcgacgctctacgggtatcaacttttgctccttcctttgtcctgcactcattctacgctatttgcctgcgaaacgtgcgcggcgcaactaacgcttagttcacataaaataacacacaatgttaatttatgtgaatcagatcaccataccgttatcttccagcgcttatattcacaatatcaaacaaaatatcacttaaattaacaaggagagcagatgaaaacgggatctgagtttcatgtcggtatcgttggcttagggagtatgggaatgggagcagcactgagttatgtccgcgcaggtctttctacctggggcgcagacctgaacagcaatgcctgcgctacgttgaaagaggcaggtgcttgcggggtttctgataacgccgcgacgtttgccgaaaaactggacgcactgctggtgctggtggtcaatgcggcccaggttaaacaggtgctgtttggtgaaacaggcgttgcacaacatctgaaacccggtacggcagtaatggtttcttccactatcgctagtgctgatgcgcaagaaattgctaccgctctggctggattcgatctggaaatgctggatgcgccagtttctggtggtgcagtaaaagccgctaacggtgaaatgactgtcatggcctccggtagcgatattgcctttgaacgactggcacccgtgctggaagccgttgccggaaaagtttatcgcataggtgcagaaccgggactaggtagcaccgtaaaaattattcaccagttgttagcgggcgtacatattgctgccggagccgaagcgatggcacttgcagcccgtgcggggatcccgctggatgtgatgtatgacgtcgtgaccaatgccgccggaaattcctggatgttcgaaaaccggatgcgtcatgtggtggatggcgattacaccccgcatagtgccgtcgatatttttgttaaggatcttggtctggttgccgatacagccaaagccctgcacttcccgctgccattggccagtacagcattgaatatgttcaccagcgccagtaacgcgggttacgggaaagaagacgatagcgcagttatcaagattttctctggcatcactctaccgggagcgaaaagttgagctaaactctaccgggagcgaaatcatgatcaagattggcgttatcgccgatgattttaccggcgcgacggatatcgccagttttctggtggaaaacggtctaccaacggtacaaattaacggtgttccaacaggtaaaatgccggaagcaatcgacgcactggtgatcagcctgaaaacgcgctcctgtccagtggttgaagccacacagcaaagcctggcggctctgagctggttgcaacagcaaggttgcaaacagatctatttcaaatactgctctactttcgacagtacggcgaaaggtaatattggcccggttaccgatgccttaatggatgctctcgacacgccgtttacggtcttctctccggccctgccggtcaacggacgtacggtttatcaggggtatttgttcgtaatgaatcaactgctggccgaatccgggatgcgccatcacccggtaaatcccatgaccgacagctatcttccccgtctggttgaagcgcaatccacagggcgctgcggcgtcgttagcgcacatgttttcgaacaaggtgtggatgccgttcgtcaagagctggctcgcttacagcaagagggctaccgctacgcggtgcttgatgcgctgaccgaacaccatctggaaattcagggagaagccttgcgcgatgccccactggtaacgggcggttctggtctggcgattggcctggcccggcagtgggcgcaagaaaacggtaaccaggctcgcaaagcagggcgtccgctcgctgggcgcggcgtagtgctctccggtagttgctctcaaatgaccaaccgccaggtagcacattaccgtcaaattgcaccagcccgtgaagttgatgtggcacgctgcctcagtattgaaactctggccgcttatgcacacgaactggcagagtgggttctgggccaggaaagtgtacttgctccactggtttttgccaccgccagcactgacgcattggcagcaattcaacagcaatacggtgcacaaaaagccagtcaggcagtagaaacactgttttctcaactagcggcgcggttagcagcggaaggcgtgacacgctttattgtcgcaggcggtgagacctccggcgtagtcacacagagcctgggaataaaagggtttcatattggcccaaccatttccccggcgtgccgtgggtaaacgcactggataagcctgtctcactcgcccttaaatctggcaacttcggtgatgacgcctttttttcacgagcccaaagagagtttttatcatgagcgatttcgcaaaagtagagcagtctttgcgagaggagatgacgcggattgccagtagtttctttcagcgcggctatgcaaccggtagcgctggcaatctgagcctgcttttacctgacgggaatttactggcgacaccgacaggtagttgcctgggcaatctcgatccgcagcggctttccaaagtcgccgcggatggcgaatggttaagtggtgacaaacccagcaaagaggtgctctttcatctggcgctgtatcgcaacaatccgcgctgtaaagcggtggtgcatttgcacagcacatggagcacggcgctttcctgcctgcaagggctggacagcagcaacgttattcgtccgttcacaccatacgtggtgatgcggatgggaaatgtcccgctggtgccttattaccgaccgggcgataaacgcatcgcacaggatctggcggaactggcagcagacaatcaggcttttttactggcaaatcatggcccagtggtttgcggtgaaagcctgcaagaagccgccaacaatatggaagagctggaggaaacggcaaagctgatttttattctcggtgaccgcccgatccgttatctgaccgcaggtgaaattgcggaattaaggagttaatgcaatgcctcgttttgcagctaatttatccatgatgttcaccgaagtgccttttattgaacgcttcgccgcagcgcgaaaagccgggttcgatgctgtggaatttctgtttccctataactactccaccctgcaaatccaaaagcaactggagcaaaaccatctgacactggcgctgttcaataccgctcccggagatattaatgcgggggaatggggattatccgcccttcccggacgtgagcacgaagcacacgcagacatcgacctggcactggaatatgcattggcgctcaattgtgaacaagtccatgtgatggcaggcgtcgtgcccgctggcgaagatgctgaacggtaccgggcagtatttatcgataatatccgctacgctgccgaccgctttgcgccacacggcaagcgaatattagttgaagcactcagccccggcgttaagcctcattatctcttctccagccagtatcaggcactggctattgttgaagaggttgcgcgagataacgtgtttattcaactagatacttttcatgcgcaaaaagtagatggcaacctgacgcatttaatccgcgactacgccgggaaatatgcgcacgtacaaattgccggactacctgatcgacatgaaccggacgatggagaaatcaactatccgtggctgttccgcctgttcgatgaggtgggatatcagggctggatcggttgtgaatataaacctcgtggcctcaccgaagaagggcttggctggtttgacgcctggcgctaattcgttaaatccctaattacaacgtacccatacatccccccatctacggatggggtaggttaactataactttcagacagggtttcccatgtccacaattacattgttatgcattgcgttagctggcgtaatcatgctgttgctgctggtcatcaaggcaaaggtacaaccattcgttgctttgctcctcgtcagcctgttagtcgcacttgcggcaggtataccggcgggcgaagtgggtaaagtgatgatcgccgggatgggcggtgtgcttggttccgtcactattattattggtctgggcgctatgctggggcgtatgatcgaacactctggtggtgcagagagtctggctaattatttcagtcgcaagttaggtgacaaacgaactatcgctgcgctgactctggcagcgttcttcctcggtattcccgtcttctttgatgtcggctttattattcttgcgccaatcatttacggttttgccaaggttgccaaaataagcccactcaaatttggcctgcctgtcgctgggatcatgctcactgttcacgtggcggtaccgccgcatccaggccctgtcgccgcagcggggttactccacgcagacatcggctggctaaccatcatcggtattgcgatttctattcccgtaggggttgttggctactttgcagcgaaaataatcaataagcgccaatatgcgatgagtgtagaagtactggaacagatgcaactggctccggccagtgaggaaggcgcgacaaaattaagcgataaaataaatccaccgggcgtcgcgctggtcaccagcctaattgttattcctatcgcgattatcatggcgggtacggtttccgcaacactgatgccgcctagccatcccctgcttggtacgctacagctgatcggcagtccaatggtagctctaatgattgcgctggtgctggcattctggttattggctttacgtcgcggctggagcttacaacacaccagcgacattatgggcagtgcgcttcctactgcggcggtagtgattttggttactggtgctggaggggtatttggcaaagtgctggtggaaagcggcgtcggcaaagcccttgccaacatgctacaaatgattgacctgcctctgttaccagccgcatttattattagtctggcgctgcgtgcaagccaggggagtgcaaccgtagcaatactgacaaccggcgggttactcagtgaagcggtgatgggattgaatccgattcagtgcgtattggtgacgctggcagcctgctttggtgggcttggtgcgagtcatattaatgacagtgggttctggattgtgaccaaatatctggggttgagcgtagcagacggtctgaaaacctggacagtgttaacgaccattctcggttttaccggattcttaattacctggtgcgtatgggcggtaatttgaccttaataaaaaggtccgatgggcatcggaccttttattgtgcacagaaaaggccagcctcgcttgagactggcctttctgacagatgcttacttactcgcggaacagcgcttcgatattcagcccctgcgtttgcaggatttcgcgcaaacggcgcaggccttcaacctgaatctggcgaacacgttcacgggtgaggccaatttcacgacctacatcttccagtgttgccgcttcgtaccccagcaaaccgaatcgacgtgccagcacttcacgctgtttggcgttcagctcgaacagccatttgacgatgctctgcttcatatcgtcatcttgcgtggtatcttccggaccgttctctttttcatcggccaggatgtccagcaacgctttttcggaatcaccacccagcggggtgtctacgctggtaatgcgctcgttaagacgaagcatacggctgacgtcatcaactggcttatccagttgctctgcgatctcttccgcacttggttcatggtccagcttatgggacaactcacgtgcggttcgcaggtaaacgttcagctcctttacgatgtgaatcggcaaacgaatagtacgggtttggttcataatcgcccgttcaatcgtctggcgaatccaccaggttgcgtatgtactgaagcggaaaccacgttccgggtcaaacttctctaccgcgcggatcagccccaggttgccctcttcgataaggtccagcaacgccagaccacgattgccataacggcgggcaatttttaccaccagacgcaagttactctcgatcatccggcggcgagaggcgacatctccacgcagtgcgcgacgcgcaaaataaacttcttcttcggccgttaacagtggactataaccaatctcaccaaggtaaagctgagtcgcgtccaacacacgctgtgtggctccctggcttaacagttcctcttcggccaaatcgttatcactgggttcctgttctactaaggccttttcgtcaaaaacctcaactccgttctcatcaaattccgcatcttcatttaaatcatgaactttcagcgtattctgactcataaggtggctcctacccgtgatcccttgacggaacattcaagcaaaagcctggttccgccgatttatcgctgcggcaaataacgcagcgggtttacggatttccccttgtaacgaatttcaaaatgcaagcgtgtactactggttccggtgctacccatggtcgctattttttgccccgccttaacttcttgttgttcccggaccagcattgtgtcgttatgggcgtaggcactcaggtaatcatcattatgtttgatgataatcagattaccgtagccgcgcagcgcgttaccagcataaacaacgcggccatctgcggtcgcgataattgcctgtcctttgctgcctgcgatatcaatccccttgttgcccccctcagaagcgccaaaggtttcgatcactttgccctcagtcggccagcgccaggtggagataggcgtactggtacttgtactgctgacagtcggctcggttgtgcttgctgttggtaccgttacaggcgctgtgaccgtggtcgcagttggcttgttgttcggcaacattttgttagcactctgttcaccgctagactcagaatacgtaattgtcggttggctcgcaacagcaacggtggaattttgtgcaggcttgatcacaactccttgctctgctgcgtcggcctgggtaatggcatttccgccagtgattggcgtaccggaagcattacccacctgcaaggtctgaccaacgttcagcgcgtatggtgcctgaatattgttgcgctgagcaaggtcacggaaatcgttgccagtaatccaggcgatatagaaaagtgtgtcgccttttttcacggtataggtactgccgctataactgcctttcggaatgttcccatactgacggttatagacgatgcgtccgttttccatctgtaccggctgctgagctactggctgcactggctggatttgcggttgttgagtagcctgaatttgtggctgctgcaccggctgaatttgcggttgctgcgctgtagacgtcgtccccattttcggcggcggcgtaatcaacataccagaattagtatttgcaggcgcattgccattaacggagctgaccggtgccggtggattactagtgtcagaacagcctgccagccataggctaaccagactcaaagccgcaatgcggcgaacggtgaattttgggcttcccgcgctcatttatcccccaggaaaaattggttaataaccagtgacataattaccgtgcaaggcaccctactgaacactggaaaagatgttcacgatacgctgacctgcggcaaaataaccaggaaaaatccaggtatttcctcacgttttaagccagctcacccttcactaaagggacaaagcgcacggcctccacggtatcgataataaattcgcctccccgacgacgcacccgtttcaaatactggtgctcctcccctacgggtaagacgagaatcccgccttcgtccagctgcgtcattagcgcagttggaatttccggcggtgccgccgtaacaatgatagcgtcaaacggcgcacgtgcctgccaaccttgccatccatcgccatgacgggtactaacattatgtaaatcaagatttttcaggcggcgacgtgcctgccactgcaagcctttaatccgttcaacgctgcaaacatgctggacaagatgcgccaggattgccgtttgatatccgctaccggtgccaatttccagcacccggctctgcggcgtcagctcgagtaattcggtcattcgcgccaccatatatggctggctaattgtctgcccctgacctatcggcaaagcgatattgtcccaggctttttgttcaaacgcttcatcaacgaatttttcacgcggcacggcggcaagtgcattcagcacctgctcatcctgaataccttgcgcacgtaattgatccagaagtgcttgtacgcgtctgcttaccattgcgtgccaactcccacgctgtttaaccagtcactaaccacatcttgcgcgctatgcgcagttaaatccacatgcagcggcgtgatggagacatagccctcatctaccgcagcaaaatcggtccccggaccagcatcacatttaccgcccggcgggccaatccagtacagcgtattgccgcgcggatcttgctgcgggatcacctgatctgccggatgtcgtgtaccgcagcgcgtcacgcgaatacctttgatttgatccaagggtaaatccggaacgttaatattaagaatacgcccggtgcgcagcggctctttacacagtgcgcgcaaaatactacaggttaccgccgcggcagtgtcgtaatgtttatgcccgtcaaggctgacggcaagcgccggaaaacctaaatgacggccttccatcgcggcggctaccgtaccggaataaataacatcatcccccagattcggcccggcgttaattccggacacaacaatgtccgggcgcggacgcatcagagcattcacgccaagatagacgcaatcggtcggggttcccatttgcacagcaatatcaccattttcaaaggtaaacgtgcgcagggaggattccagtgtcagagaattactagcgccgctgcggttacgatcgggggcgaccacctgaacgtcagcaaactcacgcaaggctttcgccagcgtttgtataccgggtgcatgtaccccgtcatcattactcagcaatatgcgcataatcacctgttgtgttgataagttccctgacaacgctggttgcaaaactacccgccggaagccagaaacggatctctacggtgacgtcatcccaccaattccagcttaattgttgcggatacagcagcatcgctctgcgcgcggcttcaactttttcgcgcaccagtaaagcttgtaattcagtttctgcggcgacagctgcttgttcgaatgccagcgcttcacgctgagttccccattcgccactgcctggcaatgcggcggttatcatcaactctttatcgttgacgcgacgctgtaattccgccagttcttcggtggttgcgacaaaccagctaccacgtccggctaattgtagcgcatcgccgtcaacaacttgattaacgtctgcttttttgaggcgctcagcaacaatctgattaaacaacgcactgcgggctgcgctcaaccaaaaactccgtttattgcgatcgcgcaccggagtattggtttgcgcccagcgctgcgccccctgcaagttgctaccgccaatcccaaaacgttgggcaccgaagtagttcggtacaccttttacgcaaatatcgatcagacgttgttcaacgtcatcgcgattgctcacttcgcgcagaaccagggtaaaggcgttacctttcagcgcgcctaaacgcagcttgcgcttgtgccgcgcatactccagcacctggcagccttccagttgaaaggcgctcagatcgggcatttccttgcccggcacgcgagcgcataaccactgttccgtaacagcatgtttgtctttttgcccagcgaagctgacttcacgggcatgaattttcaggaatttcgccagtgcatccgccacaaaacgggtattgcagccgtttttgaggattctaaccagaatatgctcaccttcaccatcaggctcaaagcccaaatcttccaccaccacaaagtcttccggattggctttcagcagcccggtgccttgcggtttaccgtggaggtaagtgagattatcaaactcaatcattttgttgccttaatgagtagcgccaccgcttcacaggcaatcccttccccacgtccggtaaatcccagtttttccgtagtagtggctttcacgttaacatcatccatatggcagccgagatcttcggcaataaacacgcgcatttgtggaatgtgcggcaacatcttcggtgcctgagcgatgatagtgacatcgacgttgccaagggtataacccttcgcctgaatacgacgccaggcttcgcgtagcagctcgcggctatcggcacctttaaatgccggatcggtatccgggaacagcttgccgatatcccccagcgccgccgcgccaagcaatgcatcggtcaacgcatggagcgccacgtcgccatcagaatgcgccagcaatcctttttcgtaaggaatgcgtacgccaccaatgataattgggccttcaccgccaaaggcatgtacgtcaaaaccgtgtccaattcgcattatgtattctcctgatggatggttcgggtgaggtaaaactcggccagtgccaaatcttccgggcgcgtgactttaatgttatccgcacggccttcgaccaactgaggatggaatccgcaatattccagcgcgctggcttcgtcggtaatagtcgcgccttcatttagagcgcgcgtcagacagtcatgtaacagctcacgagggaaaaattgcggcgtcagcgcgtgccataagccgttgcgatcaacggtatgagcaatggcatttttgcccggttcggcacgtttcatagtatcgcgcactggtgcggcgaggatcccccccgtgcggctggtttcgctcaacgccaacaatcgcgcgaggtcatcctgatgcaaacaaggacgagcggcgtcatgcaccaatacccactgcgcgtcgccagcggctttcagacctgccagcacggaatcggcacgctcatcaccgccatctacaacggtgatttgcggatgattcgccagaggaagttgtgcaaaacggctatcgccaggacttatggcaatgacgacacgtttcacccggggatgcgccagcagcgcatgcacgctgtgttcaagaatggtttgattaccgatactgagatattgcttaggacattccgtttgcattcgacggccaaatccggccgccggaaccacggcgcaaacatccaaatgagtggttgccatgttaattcccgggctgatttatcgattgttttgccccgcagactgtgcgcgcttgctcgcgtcaggcaccagacgataaaaagtttcgcccggcctggtcatgctgagttcattacgcgcacgctcttcgagcgcctcctggccgccattgagatcgtcaatttcggcaaaaagttgatcgtttcgcgctttaagtttcgcgtttgtagcttgctgtgccgccacatcatcattgacgcgggtatagtcatgtataccgttcttaccgaaccacaggctatactgtagccagaccagaatagccagcaacagcagcgttagtttacccatcctgccccctgaaaaacggcatcatcatcccatgcatccgaagacgactctacatcctctgttggggataccgcgacaacgcgggcaaatgtaccacatttgtccattgttacgtatacccagggcgtgcagaacataatctcattattagttacggtttgaattatgaacagaggagacgggaaagtacaaattagcccagtagccacataaacagtgcgccaaacataatgcctactgtcaccagggtgaaaacaatactgtagcgtagctttccgtccatcaaactatgcagcgcaatccccaccactaccgcgacgggcatcagcgccagaaagaaaggccaggtgtagataaagaagaacagcgtgttagagccataaatcaacatcggcatcgccagcgcaaataaccaggagataaaaccgaccacggcaccaggcagactccatgtggtttcttcatcctcagtaaggctgtcgttatttgttagtgtaatgttatggctattacgcatatttgatcctgttactttgacgaaccgggcatggaaacccggtggtgtctcaggatctgataatatcgttctgtctcaacagatctaataattgctgtaccaaatttgttactaattgttcaccattgagatgaatttctgcgctttcaggcgcttcgtaaacggaatctattcccgtaaagttgcgcagttcaccggcacgcgctttcttatataagcctttgggatcgcgggcttcgcaaatcgccagcggcgtatcgacaaacacttcgataaagcgcccttctcctacgcgttcgcgaaccatctggcgttcggcgcggtgtgggctgataaatgcggtcagcaccaccagtccggcttcaaccatcaaattcgccacttcaccgacgcgacggatattctctttacgatcggcatcgctaaaaccgagatcgctgcataatccgtggcgaacattgtcgccatccagcagatacgtactgacgccgagtttatgtaacgcctcctccagcgccccggcgaccgtacttttaccggacccggagaggccggtaaaccacagcactacaccacgatgaccgtggtgtagctcgcgttgttgcacagtgaccggatggctatgccagacgacgttttcgtcatgcagcgccattatttatcccccagcaaatcgcgcgcgccccagtgcggaaagtggcgacgaaccagagcattcaattccagttcgaatgcactgaattcagatggcgcagcagttgcctggctaactggctcgtgcaccataccggcacccacggtcacattgctcaggcgatcgataaaaatcagcccacccgtcaccggattttgttgataacgatctaacaccagcggctcgtcaaaagtgagatccacgaggccgatcccattcagtggcaggttttcaacttcacgctgggtaaggttattaatatcaacctgatagcgaatgccatcaacacgcgcgcgcgtcttcttaccggcaattttgatgtcgtaactctgccctggagaaagcggctgttccgccatccataccacatccacgctcgcgctctgcaccgccggtaacgcttcgtctgccgccagcagcagatcgccacggctgatgtcgatctcatccgtcagcaccagggtgatcgcttctccggcaaaggcttcttcgcgatcaccatcaaaagtcacgatccgcgcgacgttactttccacaccagagggcagcactttgacacgttgcccgacttccacgcgaccggatgccagcgttccggcgtaaccacgaaaatcgagattcgggcgattaacgtactgcaccgggaagcgcattggctgagcatccaccactcgctggatctccacggtttccagcacttcgagcagtgtcggaccgctgtaccacggcatactttcactttggcttgccacgttgtcgccttccagtgcagagagcggcacaaagcggatatccagattacccggcagctgcccggcaaaggtcaaataatcttcacgaatacgggtgaacgtctcttcactgtaatccaccagatccattttgttgatcgccacgaccagatgtttgatccccaacagtgtggagataaaactgtgacgacgggtttgatcgagcacgcctttacgggcatcgatcagtaagatcgccagttcacatgtgcttgcgccagtcgccatattgcgggtgtactgctcgtgccctggggtgtcggcgataataaatttacgcttctcggtagagaaatagcggtaggccacgtcaatggtgatgccctgttcgcgctcagcttgcaggccgtccaccagcagagccagatccagcttttcgccctgggtgccgtgacgcttactgtcgttatgcaggctactgagctgatcttcgtagatttggcgggtatcgtgcagcagacgaccaatcagagtacttttgccgtcatcgacgctaccacaggtcagaaaacgcagcaggcttttatgttgttgcgcaatcatccaggcttcgacgccgccttcattggcgatttgttgtgcaagtgcggtgttcatcttaaaaatacccctgacgttttttcagctccatagaccccgcctggtcgcggtcaatcacgcggccctgacgttcactggtggtggaaaccagcatctcttcgatgatttccggcagtgtttgtgcattactctccaccgcaccggtcagcggccagcagcccagcgtacggaaacgcaccatccgttttttaatcacttcgcccggttgcaggtcgatacggttgtcatcaatcatcatcaacataccgtcgcgttccagaaccggacgttccgcagcgagatatagcggaacaatgtcgatattttccagccagatgtattgccagatatcctgctcggtccagttagagagcgggaagacgcggatgctttcgcctttgttaatttgcccgttgtagttgtgccacagctccgggcgctgatttttcggatcccagcgatggaagcggtcacggaaagagtaaattcgctctttagcgcgggatttctcttcgtcacggcgcgcaccaccgaaggcggcatcaaaaccgtatttgttcagcgcctgtttcaggccttcagttttcataatatcggtatgtttcgcgctgccgtgcacgaatggattaatccccatcgccacgccttccgggtttttatgcaccagcagttcgcagccgtaggctttagcagtacgatcgcggaactcatacatctcgcggaatttccagccggtatcgacatgcagcaacgggaaaggcagcgtacctggataaaacgccttgcgcgccagatgcagcatgacgctggaatctttaccgatagagtagagcatcaccggattactgaattctgccgccacctcgcgaataatgtggatgctttccgcctccagttgccgcaggtgagtaagtcgtatttgatccataaccgttcctttgcaataccgctattttcttgccatcagatgtttcgactatagggagcgtaagagaacgaatgaaattaccaattagaatgagtagttccttaacggaataacgatttggcaaagctaatatcaaaaagtgcttaaggcaccggatttcgggcgtttaggaagatttgaaattgttttagcgcagcggcagtttcatactatggcggtaaaaaaatttgcatggtatttaaggactcactatgttttccgcattgcgccaccgtaccgctgccctggcgctcggcgtatgctttattctccccgtacacgccagcagtcctaaacctggcgattttgctaatactcaggcacgacatattgctactttctttccgggacgcatgaccggaactcctgcagaaatgttatctgccgattatattcgccaacagtttcagcaaatgggttatcgcagtgatattcggacatttaatagtcggtatatttataccgcccgcgataatcgtaagagctggcataacgtgacgggaagtacggtgattgccgctcatgaaggcaaagcgccgcagcagatcatcattatggcgcatctggatacttacgccccgctgagcgatgctgacgccgatgccaatctcggcgggctgacgttacaaggaatggatgataacgccgcaggtttaggtgtcatgctggaattggcagaacgcctgaaaaatacgcctaccgagtatggtattcgatttgtggcgaccagcggcgaagaggaagggaaattaggcgctgagaatttactcaagcggatgagtgacaccgaaaagaaaaatacgctgctggtgattaatctcgataacttaattgttggcgataaattgtatttcaacagcggtgtaaaaacccctgaggcagtaaggaaattaacgcgcgacagggcgctggcaattgcgcgcagtcacggaatagccgcaacgaccaatccgggtttgaataaaaattatccgaaaggcactgggtgttgtaatgacgcagaaatattcgacaaagcgggcattgctgtacttagcgtggaagcgactaactggaatcttgggaataaggatggttatcagcaacgcgcaaaaacacctgccttcccggcgggaaatagctggcatgacgtaagactggataatcaccaacatattgataaggctcttcctggaagaatagaacgtcgctgccgtgacgttatgcggataatgctacctctggtgaaggagttggcgaaggcgtcttgatgggtttgaaaatgggagctgggagttctaccgcagaggcgggggaactccaagtgatatccatcatcgcatccagtgcgcccggtttatccccgctgatgcggggaacaccagcgtcaggcgtgaaatctcaccgtcgttgccggtttatccctgctggcgcggggaactctcggttcaggcgttgcaaacctggctaccgggcggtttatccccgctaacgcggggaactcgtagtccatcattccacctatgtctgaactcccggtttatccccgctggcgcggggaactcccgggggataatgtttacggtcatgcgccccccggtttatccccgctggcgcggggaactctgggcggcttgccttgcagccagctccagcagcggtttatccccgctggcgcggggaactcaagctggctggcaatctctttcggggtgagtccggtttatccccgctggcgcggggaactctagtttccgtatctccggatttataaagctgacggtttatccccgctggcgcggggaactcgcaggcggcgacgcgcagggtatgcgcgattcgcggtttatccccgctggcgcggggaactcgcgaccgctcagaaattccagacccgatccaaacggtttatccccgctggcgcggggaactctcaacattatcaattacaaccgacagggagcccggtttatccccgctggcgcggggaactcagcgtgttcggcatcacctttggcttcggctgcggtttatccccgctggcgcggggaactctgcgtgagcgtatcgccgcgcgtctgcgaaagcggtttatccccgctggcgcggggaactctctaaaagtatacatttgttcttaaagcattttttcccataaaaacaacccaccaaccttaatgtaacatttccttattattaaagatcagctaattctttgttttcaaacaggtaaaaaagacaccaaccttaaaccatccaaatctaccggggtacgcctgtttaacccaaatgtctggaactcaaatcccgtttccgtattcgttgcccatgccatcactacattgccttcttccgccagtccagctatttgttcccagatcatttcacgaatttttgcggatacatcacctacatatacccctgcacgtacctccaacaaccagatggctaatctgcctcgtaagcgcggaggtacattttcagtgaccacgaccaacatactcatttcagctactccgatggcctgcatctcccagactaacaggaagcggaatggcaacaggctgtgcatcttcaggtggggccggcggttgtatttctccagcggcaagcacgtcctctataagcggaatcaatttggctaatgttttactactgcgaaaaatatccctgcacgccaaacggacttcccggtccggctcaccagggttacgacgcgctatctcaaaagctttcggtacaacagtgtcaaatttaatgatgtctgcaatatcgtaaacaaaggaaagaggctttcctgtatgcacaaacccaatagctggtgcataaccagctgcaagtatcgccgcttcagttacgccgtataaacaggaagttgcagcgctaatgcattggttgatcgtatcgcccttttcccagtctttcggatcgtagcgacgtccattccatgtcacgccgtattgcttcgccagaagtgcgtaggttgcccgcacgcgactgccttctatacctctgagttgctctacggagcgccgggcaggcgcaggttctccaaaccgaagttcaaacattttacgtacgaccttcagacgcaaatcttcatccagagcaagttttgcctgatagagcagcttatcactacgcgcacctccaggctgaccagaagcataaacacgaacgcccgcttcccccacccataccaacaatgttccaacttgcgcagccaggcgtacagctgcatggctaacccgtgtaccaggttccagcatgatgcaggcaacgctgccaacaggaatatgagtgcggatccctgtcttgtcgataagtacaaacgcgccatctattacatcgatctgcccatattgcagaaagatcatggagacgcgatctttgagtggaatgggattaaggggaagccaggtcattttattacacctcaatcacagtggagccaaagatagcaagccacatcccatgcttttagctggcccaataccttgctgtacaagatctattaacgctggcgcgtcgttgatggtgagcacaccttcaaagcaaaccgtttggatctttccacttttaccatcaccagaaaaatactgtggccgttcgcttatgggatgcacatcttcaacgcgcgccgcattgcccaatttacgttgcaaccacgcgatttgttctgcttcttttattaacggaacccgacagcgtttaatattccctttactgtccaggcgcttttgattgtcgagaatagttttgatcggatttgcccgaagccgaaaatagagtggaacaccaacctgaagttgaaattcaacctgtttagttttaatgactgtcgcaacggcagtactaacaggcatttgcgcactctgcaataaaacatgacagccttctggtgtgtttcgcttctcaacatgaaaaagaaaatcacgagcagcatccggtctgtttggaaataaatgccataatccctggtgaagttggtaaagatccctgctccaggccctggcaatgatgactttactgagatacatccatacctcctttaatcacataccattctcgggaagcaaattgtcgaggcaaggtgatcatcggttcgtcgcgcgccgtaaattttaaatgatgccctgtaacactttcctcactatatatatcgccgccaacgggctcataatttaatagcgccttctgaggatcgcttgcctgacatgtccccaaaaaaagcgggtgtgttagtgggcaacttctccgccccaggtaaggtgtataccgaggctttaatactgctttttcaagttcactgataaccatcgttgcatggggtgttaaccagagagcgacggtaaaggaggcatcacataaatattcgcgccatgtttgaatcgtttcatgacttttcaaaccacggtaatcttctcgcgctccaaggactgtatggtaatcacgcaaccccgttacagacacacgacgatcgtcaagaatgagttcatcgcagcgcactgcaaattgcacactctcacttaacgcctgtaaactagaagtatcatcacgttggatcccaagacaagccccgagtagccctaataacccgcttcgggtcggaaatcttccggtaggtcgcgttccttcaaaggtcggctgcccccaggcttgcattggcccagcaagccgcaagatcaaataagatctcatgttcacgcctcgccattattacgaacccaggattttaactgttctaaagtaggcatttgtttaacttgagcagtaattgggtctacatcagataagctgaattgcgcagcagctccgttcagaccatatccattggcaacgcgatcccaatattgattaaacgcctgtatagacggttgcaaaaagccatctttcgctttaaccgctttttcaaaagcatttgccatagaaagtggcatatcggagaaattaaccattaccatatccgcagggttaaaagcggcataagtacgctgttttgctccagggacctctgttgccagcatatgaacaacatgggttgcaatttccagagcctgctccctggaggcaccacctaaattttcctgaagttgagcgaggttaatgttggcataacgataaaaaacaccgctactaaattcctgagttcccagatgtgcagaaccttgttcctgtaaatcatctacagcggtgaaccagtcaatatcagaatcaacctgatgagtagtgatcgcatgcgcaatggacattgcaccatcaacttttcccaactcagtcatcatgccgctggttgccattcttccactaagcgcaatatcaacaccctgctgtaaattcacacgtatggcggcaatatcttccttaagaactttgagcagctttttatcatccagattatcagcctctgcttttgcaacctgctcacagaaccaggctatttctcccacaacccagggagtaaccgcatcggcagaaatcttttcggcttcatcaacacttttaccggagagcagcgctaatgtcttatcgatgattttttggtcaaaacgttcaccaagtttttgccgaagaacatcacgtaattgtgcaagatgaatggttctgagactggattcaccaatattttgtgcgtaataaccacttttacgcatcgcacgtttaaggctttgactactaattcttactcgtcttttgccgccgaaaatagcgtctttctgcatgttcatatcgtcgcggttcagacaactagggctgtgagagatcagaacatgaatattgataaagttagacatagaaaggtttccttacgcatttttgtttgtggtcaatacaaaatcttccagaagttgctggcgttcgcgctttccccaccaggtcaacatcctggccattaatggccagtcaagtacgggttcggcgtgagtaagtaatcgacgtaactggaccatatcggctgttctgtcagcccgaattaattgaaagatacggcgctcgttaattcttccactattggctaaagctcttcccaagctgatacctgttgtttgctcgctttttttgtcctgatgtcggatgacattctttcctgcgctcaggcaaaacaccatgcgcaaaagagcctgctggtgacgtgggttttcccaaccaaaaggttgcaccagcctataaaacgcagggatatcgcgtaattcatcaggttcactaacacgtctaatttgcgcacaacttccattatccagttgttgccaggctcgatataaagccattgcatcaatttcatcagccattacttggccctccttgcggttttaactcccgtaaatgtttgtatagcgtggcgcgggcaagcgctaatgtgcttattaatttaggatgatgtgcatagggagctacagattgattaaatagcatttcacacaattgatgaagtttgtctcgtaaatcagctattacctcatcagcctgggaaaaattaacattcgccagtacatcgggaattaataattcactctgtcgatagaaatgcctttctgcagtctcatgaacagagactccggcccctttgaagtctttatttttaaacccttctgcaaaggtatataacgccttgcgtaaggctgttttatatcccaaaccaacagtcactatttcgtttatcacattgccgtattgttgccacccctgattaaacatcaacacatcatgacgccgttcaagaatagatgcttgattattacgatatccccccataatcaattcaagaggactttgcggcgcaatatttctgaattgattcacaaccgccgccacgcgatttccattttcattttgaataatcttatctaccacaactcggctgatttgtgtccaacttggtgcggaggtggtgaaagcaagaaatttttcctcaacctcccctttcttgactgttaccagacaaggggaatgcggatggggccatagcccattaactgtaaaggtaaatttttccttaagaaaaccggtataacgcaaattgctttcctgtccacagcaagaacatttaccaatcccaatgggatcgcataattcaatatgcgctggttgccagaatagaccacggacaaacccaatactgctagcaggtatagactcattggacttgataggtttaatccaggtaggttggttttccgtatgactttcattaggaaattgtttttgaagacgaggtaatgtgaggacattgagtaacaccgtactacgaagatcgatcccacgtacgaacgttgttacaggtgttcctccacgtaaaccgcttttaaaaccaccaccaaaacctggtgcctgattcgcctggttgaataacgcaatcgcagtgcatccaccacataatgcttcaccctgccccggttgattgacaaatgcacaattcgtcgcgccgcttaccccagccaacagtttttccattggagtcacatcatttgctttgacacctttggtctgcataaagggatgttctgcgtgattaaggtagaacatatctatccacggcgcgatgagttgttgaaactcatcttcagtgagcggattcattatgcgatgtcgaaattcaacgtcatcttttgccggggcgataatttgcccaatgcaaaccagcagtgctaaagcggccagttccatatcgtcacggggcaaacttaatcgccactgatctctactgcagtataggctttgcagatttatgatttggactttccccccgtttcgcgggcgtacagggatccagttatcaataagcaaattcatttgttctccttcatatgctccgacatttctcctgcatttctatacgtcggcacacttccgttatcggtaaaaacaaagaaaaaatacggcgtaattaattcaataatcacattcactgcaaaaatatattcattggtttaatacaattaacctatacatatattaagatgtgttgaattgtttaaagacaataatgcatgcatttcaaatctgcaagttattcgttttattattaaagaaacttttagttataataattaccatgaattttattacataaaatattcatactgtgaatataaaatctcataccgggaaattaaaagaagatgtacattgtgcaccttccctacttaagtagggataaaccgttattggtcttattatcgtcattgataacaatcattcccgaagttatttgggatttgcagggatgactctggtcatcccttcatcccctgtataggtaataacaatactgttaccctgccagacccatccatccagattctgtttcccttccagccaaagtaacccatcttcatctactacttcagaaaaactacgtttccaggtgaagggtacattgacgcgattaagtgcaagcgcctcatactgctgttcatgacttaggtcctcgtagacctggccatcgagcagttgtttaccactagacgtttgtacataaggcaataatggcaggctcatttccccatccctcgttaccgcaagaatggtttcatcgttatcctgcaagctatattcttcagcccactgcaggaccttgcgagccttgaaccttttttcacactcggcgctttcaaatttatccatgccattgccgacccattctggctcatccatttccgcatcatcgtaaatgctatccagccattgccggtaagcatcagggaaaaataaggatgctccattaagctcctcaatatgttgctgcgtccgccacatgactctaacgttgctataaatatgctcatgtcgtccgtaaccctcgccatcaggcagcaaaatggtggcaacaggaatctcaaaaccagcgggacgatatttgcgatgatggcgatgtaaacggcccaatcgttggaaaagcaaatctgcaggacaatgctgagtaattaaccaatcaaaatcaacgtcgagactttgttccacgacctgggttgcgacaagtatccgtccaacatttcgcttcccatttttgccgaaattgctaataactcgattctctttttcacgacgatcgttcagcgtaaagcgcgcatgaaacaaatctatatctacttgcgtgttatttagctcctttagccgttggtagcatacttgtgcaacgtcaaccaaattgcaaataagacagacctgtgcacccgcgtttgccgctgcgatcattcgctctaacatcgtaaggtcaggtaacatgtcagctaaacaaataggttctggctgaatgctaaagcggggcgggagttgttctggatgagctagcagatcaaaacgttgcgcaccattcacacctcgccagttaatgagtggatatgcggagttattttccactggatctgtatgcagaccataagtatccagaagtttctgtttttgtttcattggtagggttgcggaaagaagaataacactccctcccacatcagcctgagccttgagcactgcctccagcaagccgttcatataggtgtcgtaagcatgaacttcatcaacaattaaaacacttcgaccaattcccaaaccacggataaagcggtgtttaactggcaatacgcttatcaacacctgatcaatcgtgcaaacgccgatttgcccaagaaacactttcttattgctttgactcaaccactgacaacactgaacccacgcttcttcttgcccctgttcagtaatcgcgcgactttttatactttgaaagaggtggttaaaccgactattgccatgagcaagaataagatttggggaactaaataagtggctcgcgctcgcttccattctcgtaagcatagcattcgcggtagcttgtgttgggagggcaaaaataacactatccgcaatttgttgatcaataagtttccaagcataggccagcgctgtttccgttttaccggagcctgtaggtgcctctattaccgtcagcccgggagctactggaagagcatcaactaacacctgtaattgtctgggttgatagccattgtccagtagtgcatgaacaccttcataacatcgcttattacttacaagtccactcaactccaatacccggctcgcatcctgctgtcggtcctggaaatacgttctcagagcatttatgtcggaaggcgcatcctcattaaacagaaaggtattcgttgtagtccaggagcctaaccagtcagcaaggctgcaaaaacctgctaacagactactacaatcaggtggtatatcgtttatagataaccccgctggcgttaaaaataatgcttccagtacagatatccactcctcacgagcctgtttatcttgcgcagcataagatgccagagaagctggcatttcccaacggctcttatcttgatcctgggaatgtaatataaaaccatgatgtcctgtaacggcctctacccatggaaaccaggactcataaggatgaggagcggcatcaaaaaaactgaaaaaatccccgagagattgctcactaagactatcctggttaaaccaatacagaccggctgcaccatgattaaatttacggcacatttgtgtacttggaccattaagacttggcgttgcaggatttaatttcagccaactttctgcacttttatattggaatcgtatatcaaactttccaatatcatgaagagcaatgaaaaataacagccaggccttcaccctctgtttacttagcatttcatttcggcaaaaagtattttgcagtacgacactttgatcccaccagcaatctgcaacagcagcaacatcaaggcaatgataaattaacagatgaatatcatttcctttcgtcaagcttttactggattttccccagtaatggcatatatatttaaaaggttccattaatagcctccctgtttttttagtattatcgatgatatcagcgggctatttttcgatgctgctcataaatatcgaattacagtgatatacacatgtcttgcctccctgcaaagaagagactaacattcgaattgtttgggttcgaacgctggcctcaggttgatagaaatatcgcctggggcttttgtccatctggaacctcgcgaatgcttaacgccagacagcctcaagcacccgacgccattctatacctgataattcttcccgcggcgttcacgtttaaaatcaggaatgctgctcgcaaaataaaaacgcccccatcatttctgacagaggcgtttaatttgtccggcaatatttacccttcgtgtaacccacattccctttttaagccaaagaaacgcgtttcttcttccgccatgccgggttcccatttacgggttgtatgggtatcgcccacgcttaaatatccttcatcccataatgggtgatatttcaggccatgtttttgcaggtactgataaatagttcggttatcccagtcgataatcggcagcactttaaatacgccacgctgaattgccagcaccggtaaattggcacgactgccggattgttcacggcgcaggccagcaaaccaggtttgcgcattcagttctttcagagcccggttcatcggttcgactttgttgatgtcattgtacttttcaatgccttcaacgccctgctcccacagttttccgtagcgtgcttcctgccaggctgcgctttcggtagcacggtacactttcaggttgagcttgagtttgtccgttaactcgtcaataaagcggtaggtttccgggaacaagtaacccgtatcggtgaggatcaccggaatatccgggcgaatttgattcaccagatgcaggctcaccgccgcctgaatgccaaagctggaagaaagtacatattcaccgggcagattatccagcgcccaggctacgcggccttcagcgtccagtttttccagttcggcgttagtttccgccagcgccagaatgcgatctaccttcggcagttcgttcagggcgtttagatcgagtttggacatagattcctcactgtttgccttgcctgatgcgacgctcacgcgttcttatcaggcctacaagaccgggctgatggttaatcccacaaatcacgcgccggatcgagcaccgggcgaatgatgcccgcacgcaccgtaaagtcgccgaagccttcacccgcttcgcgctctttcgcccagcgccctatcagttcatcaaggctcgccaggatttccggctcggtgatgttttctttatacatccgtgggatacgtgtcccaatgcggttgccgccaagatgcaggttgtagcgacccggcgctttacccaccaggcccacttccgccagcatcgcgcgaccacaaccgttcgggcagcctgttacacgcatcacgatatgctcatcgctgacaccatgtttcgccattaaattatcgatgttgtcgataaaagacggcaggaaacgctctgcttccgccatcgccagcgggcaagtcgggaaactcacgcaagccatgctgttttcacgctgcggcgtgacggcattcattaacccgctctctttggcgatcttctcgatcttcgctttctcgctttccggtacaccggcgatgatcagattctggttcgccgtaatgcggaaatcgcctttgtggatcttcgcgatctccagcaggccggttttcagcggacgcgccggataatcaaggatgcgaccattttcgataaacagcgtcaggtgccagttatcatcaatgcccttaacccagccaatacgatcgcctcgtccggtgaactcatatggacggatcggttcaaatttgatccccgcgcgacgctccacttccgctttaaacgtctcaacccccacgcgctccagcgtgtatttggttttggcatttttacgatcggttcggttaccccagtcacgctgagttgtcacgacggcttcggccaccgccagcgtatgctccagcggcagatagccaaactcactcgcggtgcgggcgtaggttttcttgttgccgtgttcgatggaaagcccaccgcccaccaacaggttaaagcccaccagcttgccgttttcggcgatcgccacgaagttcatgtcgttggcgtgcagatcgatatcgttctgtggcgggatcactaccgtggttttgaatttacgcggcaggtaggtctggccgaggatcggttcttcatcagtagtggcgactttttcctggtcgagccagatctccgcatacgcgcgggtacgaggcaacagatgctcagaaatcttcttcgcccactcgtacgcttccgcgtgcagctggctctcgtaagggttgctggtgcagagtacgttacggttcatgtcgttagctgtcgccagcgcatcaagaccgacgctgtgcagcatctggtgcaccggtttgacgttctttttcagaatgccgtggaactgaaacgtctggcggttggtcaggcgaatgctgccatagatggtgttttcaccggcaaatttgtcgatcgcctgccactgtttagtggtaatcaccccacccggcagacgacagcgaagcagcatcgcgtggcgcggctccagcttctgttcagcacgttcggcgcggatgtcgcggtcatcctgctgatacatgccgtggaagcgaatcagcaggaagttgtcgcccttaaagccgccggtcagaccgtcgtttaaatcttccgcaatggtgccgcgcaggtagttgctttcatgcttcatgcgctcggcgtctgtcagttttccttcgaccactaaaggccctggatgtttttcgctcattagtagacatctcgctgataacggcgctctacgcgcagctcacttaaaaattcatccgccgcttcggtgtccatgccaccaaattcggcaatcacttccagaagtgcctgctcaacgtctttcgccatgcgattagcgtcgccgcagacataaatgtgggcaccatcattgatccagcgccacagctccgcgccctgttcgcgcagtttgtcttgtacgtaaactttttctttttgatcgcggctccaggcaagatcgatacgtgtcagcacgccatctttgacgtagcgctgccactccacctggtacaggaagtcttccgtaaagtgcggattaccaaagaacagccagtttttacctggcgcttcgtcggcggcgcgttgctgcataaaggcgcggaacggcgcaataccggtgcctgggccaatcataatcaccggggtttctggattggctggcaggcggaagttatcgttatgttcgataaatacgcggacttcgccctcttcttccacgcggtcagcgaggaagctggaggcaccaccggcacgggcgcggccttccacgtcgtaacgcaccacaccaacggtgacgtgtacttcgttctcgacttccgcctggctggaggcgatggaatacagacgcggcgtcagcgggcgcagcagattaattagcgcttcggcatcaagctgtgccggggagaaacgcaccatgtcaacaatcggcgtcgtcgcggcgtaatgctgtaacttcgctttatcgcccaccagcggcagcagtgtttcactgcgggtaagcgtggcgtaattctcaacaatgttggcggtgttgacggtcagttcgaagtgccactgtagcgcttcgttcagaggcaacgttttgccctcgacggtgacaggttcatcgcctttcagccacagcagttcgacaagttctttcaccagtgccggatcgttctgataccagacgcccagcgcgtcacccggctggtaacgcatgccgctgtcacctaagtcaatttcgatatggcgaacgtctttttcagagttacgcccggtaattttctggttaacagagaggctagccaccagcggcgcgtctttgctgtacgggctggtgtggatttcatttaccgcgccagtagcgacggattggctaggtgccgcgacaggcgcacggcttttaagcgcatcaaccacgcgggcgcgccactcgctggcagcagcctggtattcaacatcggcatcgacacggtcgagcaggcgttcaccacccagttccgccagcttgctgtcgaaatctttcccggactggcagaaaaattcataagagctatcgccgaggctaaacacggcaaacgcggtgttttccagctttggcgcttttttggagaacaggaacttatgcagcgcgacggcttcttccggcggttccccttccccttgcgtactcgtcactacgatgagcagtttttcgctggcgatttgtttgaatttatagtcgcccgcgttcaccagcttaacgttcagttttgctgctaataaatcatcacgtaatgcttcagcaacccggcgcgcattgccggtttggctggcggagataatagttatacccggcatttctgcggctggcgctggcgtcgctgcaagcgcagcaggctgctgattgagtacgccccagaaatagccagaaacccaggcaagctgggtgggagttaaatcggtcgtggccgcctgaaggcgtgccagttgctccgggttcaacggaagcaacgcggaaggtgggacctgtgtcgtcatgcgtcgttatgttccagtaagcaaagctgtttctgcgccctgtcagcgcccataaaacagaagagaaggtaaggttaacggggcaaacggtgtggattaaagacgggatagcgataactaataaccaaatcgactaacctgttttagcaatagtctttaacaacaaaatagattaaccaacctaatgaaaaacaaatgaatttagccaatcattaagataaatcagcgattttgcgcaacaaagtcgttttagataatgcgaaaaaacagcctttccggtactctacggcggttttatcgtcctgtagagaaattatgatgtccaccacgttatttaaagatttcaccttcgaagccgctcaccgcttaccacacgtcccggaagggcataaatgtggtcgcctgcacgggcattcctttatggtgcgactggaaattaccggggaagtcgatccgcatacgggctggattatcgatttcgctgaactaaaagcggcgtttaaaccaacctacgagcgcctcgatcaccattatctcaatgatattccaggtctggaaaacccaaccagcgaggttttagcaaaatggatttgggatcaggttaaacccgttgtgccgctgttaagtgcggtgatggtaaaagaaacctgcaccgcaggttgtatctatcgcggcgaatgataagagtgtgtcggcggtcaatttcccttaagtaacgctatgttagggtgttgtgttctggatatctggggcatgacatggaagacgactgcgacattattattattggtgccggtattgcaggcaccgcttgcgcgttacgctgcgcgcgagcgggtttatccgttttgttactggaacgcgctgaaatccccggcagcaaaaatctttccggcgggcggttatatacccatgcactcgcggaactcctcccgcaatttcatctgaccgcgcctcttgaacgacgcatcactcacgaaagcctttccctgttaacgcccgatggcgtaacgacgttttccagcttacagcccggcggtgaatcctggagtgtattacgtgcacgattcgatccgtggctggttgccgaagccgaaaaagaaggtgtcgaatgcatccccggagcgacggtggatgcactgtatgaagaaaacggcagagtctgtggcgttatttgtggtgacgatattctccgcgcccgttatgtggtgctggcagaaggtgccaacagcgtcctggctgaacgtcacgggttagtgactcgtcctgctggcgaagcgatggcgttggggatcaaagaagtgctgagcctggaaacatccgctattgaagaacgttttcatctggagaataacgaaggcgcagcgttgctgttcagcggcaggatctgtgatgacttacccggcggcgcatttctttatactaatcaacaaacgctcagcttagggattgtttgcccgctctcttcccttacgcaaagtcgtgttccggcaagcgagctgctgactcgctttaaagcgcatccggcagtgcgcccgcttatcaaaaacacggaaagtctggagtatggtgcgcatctggtgccagaaggtggcttgcacagtatgccggtgcaatacgccggtaacggctggctgctggtgggcgatgcgttgcgcagttgcgtcaataccggaatttccgtgcgcggcatggatatggcgctgactggcgcgcaggcggcggcacaaacgctgataagcgcctgccagcaccgcgagccgcaaaatctgtttccgctttatcatcacaacgtagagcgcagcctgctgtgggatgttctacagcgttatcagcatgttccggcgcttttgcaacgcccgggatggtaccgtacgtggcctgcgttaatgcaggatatttcccgcgatttatgggatcagggtgataaacctgttccaccgctgcgccagttattctggcatcatttacgtcgtcacggcctgtggcatctggcgggcgatgttatcaggagtctgcgatgtctgtaacgtaagatgttatcaggagtctgcgatgtctgtagcccgtaatctctggcgcgttgctgatgcgccgcacattgttccggctgactccgttgagcgccagacggcagaacggttgattaacgcctgtccggcaggtctttttagcctcacaccggaaggtaacttacgtattgactatcgcagttgcctggagtgtggcacctgccgtttgctgtgcgacgaaagtacactacaacagtggcgctatccgccttccggattcggcatcacctaccgctttggataaataataaggataatttatgcccctcttacacctgctccgccagaatccggtgattgctgccgttaaagataatgccagcctgcaactggcaatcgattctgaatgccaatttatttccgtgttgtacggcaatatctgcaccatcagtaatatcgttaaaaagattaagaacgccgggaaatatgcttttattcatgttgatttgctggaaggcgcgagtaataaagaagtcgttattcagtttttgaaactggtgaccgaggcggacggcattatcagtaccaaagccagtatgttgaaagcggcaagagcggaaggttttttctgtattcatcgcctgtttattgttgatagtattagctttcacaacattgataagcaagttgcgcaaagcaatccggattgtattgagatcctgccaggctgtatgcccaaagtgctgggctgggtgacagagaaaatccgccaaccgctgattgccggtgggctggtgtgcgatgaagaagatgcgcgtaatgcgattaacgcgggtgtcgtggcgctttccaccacgaataccggggtctggacgttagcgaaaaaattactttgacgggataatcgtaaccaattgaatttggtttgatttgtaggccgcacgccacatccgacattcagcgcctgatgcgacgcttgacgcgtcttatcaggcctacaagtccccaggccagaaccgtaggcaggatcatccggcaacacgttattggcaatctgcgtgaatgtttgtcaccagtgcctccagcaccactttccagtcatcaaccacgccaacatctgcctgactaaataccgcagcgctggcgtcatgattaatcgccaccacaaacttgctattgcgtacgcccgccattaacgctgctgcgccagaagcgccaacaacaatacacacctcaggtgccagcagatgtccggaaataccaatcactttttcagcatcaacgccaccgttcatcactcgcgcccgactgtagcccacttcggctcccagcttttctgccagcatagcgatttcctggttatctgcctctccgccctgccccaccaccagcacccgtctggcctcagctaatgggtcgcgggtaacatttttcagatcctctgtgctaaccagccagtccggaagcgcacccgggacaatgttcagttgttgcattccagagggcaacgtggcgtttttcgctgctcccgcctgacgcgccagggaaaggcatagcgggcgtttttctgtttgcagcgtcgccgttagcgcatttccccagtgggatttgcgcacgcttacggttggaatatctaagctagtcacctggcagatgcttgcaccatgtaaacgccaggccagccgggtgctcagttcatcgccaaacgttcccggcggaaagagaacaacgtccgcaggcgttcgctgccactgttccaccaacgcatccagcacctgttccgccactacaggctgaggttcaatctgccagtgcgccagggtacaaccgctgaaatcctgcgccgccagccagcttgctattgcggcattctcctgatttattgtcacaattgcgatattcatggctgcatcctttggcgtaaatagtcctgccatagcttttgagctttttctgctaccgtttgcccatcaatcagcgtcgctccgcgtcgttgctctgctcttgccagttgcagacactgcatcgctggcatttcggcagcaacagttttacggataatttctgctttccccgcagccattcgctggcgcattcccggtactggcaaggccacttcaccgcactgacgcacggcaatcaccgcaggcaagcgaacccggcaacaacgcaacccatgttcagtacgctgttcgagggtgataaacagcgcgtcgagagtgaaacgctccacctgggtgaagcagggccagcccagcatttccgccagcaaaaatggcgtttgcccattctgcccttcgctgctttggcagccggtaattatcagatccagcggattctgatgctgccattcggcaatatggcgagcgacaaattccggcgcaaagcgcagatctgccgccgtctccagcaatacagcttcctcaaacccaagagccatgagatagcgcagccagtgcaatgcccgttcatcccccatgctcaacgcggttaaagacatcggcgtaccgttttttctctgcgccaacagcagcgcggcagcggcctgttcatcagcaccgagtaaacttcgcagtaggctaatatccggtccgcttttaccctgagccgccgcctgccactctttttccgccagcattccggcatccggttcggctttaaacgctaacagaatgttcattcgcacctcctacatttcccgccgccaccagcgggagggctttagtttctggtgcccatagccaggtcacaacaaaaccaaccaacaacactgtcgccaggagcaataaggtgacttgcattccccactgcgccagcacccacggcagcaggccagtacttaccgccgcgccaagtcgactcatggcagtggcaaaaccgacgcccaggctgcgaatgtcagtaggaaaactttccgcaggcaaaatgcccaccagattactgactgcgctaatggtggtgctgaagagaacaaaaagcagcagcgttaaactactgccggaaggcaaacaggccatgactaccagcgttgccgccagcagcaaaaaacttcccagcaaaaatttgcgatgtgccagcaggtgcgtcagaactaatcccagcagcgcgcccacaattaacaacgcattaagcatcaggctggcagtcagcgcatcttccagaccaatagtctgggcgatagttggcagccaggtataaatcacaaaccatgggattacgaggcagacaaagaagacgctgttaaacgccgtgcgccgccagtaacggctagagaacaaggttttgatgtgtttatgggtcgccgttaccacttcatcgcccagtaaaacatggggaccaaaatagcgatgcacgatagcgtgagcttctgcaaaacgcccctggcgcagtagccagcgtggactttctggcgttccccagcgtaataacgtaatcaacaacgcgggcagagctgcgcttgccagtagccagcgccaggcctccgggttttcggaaataaagtgatgtccggcaatacttgccagcacatagcctacggtccacaccacgctgaatgcgcccagcaaaataccgcgatggcggcgcggggaaaattcagccagcaaggtgtgacctacactataatcgcctcccagaccaatgccaatcaaaatgcgcagtccaataagatgctctggcgtggtggcaaaaaattgtaaaaagctagcaagcgtaatcagcaaaaagctgaaggtgaagattttttgccgaccaatatggtcggagatccacccaagaaccaggctgccaaggaacaaaccaaggagcgcgctgccgccgatcattcccgccataaacggcgtcagttgcatggcgggcgtaagctgaataatggcgtaaccaatgacgccgagaacataaccgtcggtcaggtgtgcgccgaaagtgagcgcagcaatgcggcagtgaaaacggttaagcggtaaatcatccattcgcaccggactagtgttcatctttaccccttcattgtccggtaataagaacggcttctcgcctgagaagccgaaaaggcaacgccccgtcatcgcggaacgctgcctgacacattatttttcaatcggatagatagtacccgtattcataatgccattaggatcgaactgctttttcagcccttccagcaacgcccacgcgctgccgtgttccagtttgctccagtgaacgcgatgtttaccgataccgtggtggtgcaccatgctaccgccgaggcgaatggtttcttcacagatgatcttgttgagcggattgtggtacttgtcgatttcctcttccggcttacagtcaacgacgttgtaatcgtagacgaagtacatgttggtgccgttctgatagctatgagaggaatgaccgcccagcatggtgatgtcgtcggcgtgcgggaactcagtacgaatacggttaataacgctttcgtagatttcgtggatgcagctccagcagccggatacttcggtggtaaagcccatgttgccggttttgaggatctgcacacgttcggcagccactttatccggtccccagttcaggttgttaaaccaggtttcgatcagcttgctgtccacgcgctggcattgcgggtagcgggcaacgatttccgcaatcccttcgcccgtcaccttcgcaatgcgagggttaccttcagccataaagatcagcacgcattttccgtcggcaaaatgggtgaagtgttgggtgccatcttcagcgtcatacaaacgagcgatactcggacgatacccttccaccatgatttcacgcaggatgttgaagccggttttcatgtcttccaggatatagccgtagaagaggttgttttccggggtgaatttaaagattttcactgttacttcagtgatatagcacaatgcaccttcgttgccgatgatgatgtgacgaatgtccgggccagccgcgcggcgtggcacgtttttaatgcgtgtgacggtgccatcagccaatactgcttccagaccaacgaccatatcttcgattgcgccgtagagtgtggagaactgcccgatacttcgggttgctaccaggccgcccatctgcgccagcggcttactctgcggagaatgccccgtggtgtaacctttttcacgcaacgcgttttccagcacttccagcggaacaccacattgcgccgtcgcctgcatattctcaatatcaatattaatgatttgattcatggcggagccgtcgagcaccacgctgttttctacaacagtttccagcccaccttcggtggcggaagcaccggtacgcggcacaccgttaattttgtgcgcattcataaaattcagcacacgggatacttgctctgtggaaccgagttttacgaccgctgccggaatcggcaaagtataaatgccatgaatatccggaaatttacgaaaacggtcaatactgtttttctttaatactgtttcatcggtaattacgcgatctgcaccaacaatttcctttagctggtcgacaatcgctgcgcgagataaagacatagtaattccttcctgataataaaaatggaataatcattaataagagaaaacagaaaccaccgttatgggttagcgcactaaataaccgccatcaaccactaataaatgcccgttgacataattgcttgccggacttgcgaggaatacggctgcgcccattaaatcctgagtatcgccccaacggtttgccggaatatgatcaagaacgcgctgattggtttctggattactgcgtgtcgccagcgtaatatctgttgcataatagccaggggcgataccatttacctgaatattatattgacctagttcatcacaataagctttggtgaacccggcaagagcatgtttagtggcagaatatgcaggactccattgtccacctaagtaagagaacaaactacagatattaataattttgccgcttttctgcgggatcataatttttgcagcttcatagcttaactcgaatgcggcggtcaggttcacatcaatcatcggatcccagtcggcacgaccgaagtccagcaccttattcagcttacaaataccggcattgttaaccagaatatcaactgtaccgaaacgctcacagcaagcagcgataatcttctgcggcgcgccttctgcggtgatacccacctgcatgaagtccacctcaacaccctgtttttcaatcatttcctttgtttcgccgttatctttgacgaaactaggaataaagatatttgcgccagctttggccaacgccatggcaaatgcctggcctaaaccgctattcccaccggtaacaattgcggttttacctttcagggagaaaaaatccatactgaacgcattgagagattcgatactcatagttagctccaatttccgtaaggcaaaaaaaaagaaaggtaacttcccccgcgagagggaagttacctttctcattatctctggtaactggagataatttttagcataagggcataactgctaatgtgatcgtaatcacagtgtgatattcgtattgtcaaataattttaaaaagcagaagcgtgattactctcacacaacacctctgctttccatgttatttattatttcaattactagagacctgagaaaagtaatccacctgaaagggcggcttacttttctcttttttttgtctattacaaatgggaatacgatatgcaacacaacagttatcgccgttggataaccctcgcgataattagttttagcggcggcgttagtttcgacctggcttatttacgttatatttatcaaattcccatggcgaaatttatgggattcagcaataccgagataggtttaataatgagtacctttggtattgcggccattattctttatgcccccagcggcgttattgccgataaatttagtcaccgcaaaatgattacttccgcgatgatcattaccggattactgggtctgttaatggcaacgtatccaccgctgtgggtaatgctctgtattcagatcgcctttgcgataacgacgattttaatgctgtggagcgtgagcattaaagctgcaagcttgcttggcgatcatagcgagcaagggaaaattatgggctggatggaagggctgcgcggcgtcggtgtaatgagcctggcggtgtttaccatgtgggtcttttctcgctttgcaccggatgacagcaccagcctgaaaacggtcattatcatctatagtgtggtttacatcttgttggggattctgtgctggttttttgttagcgataacaacaacctgcgcagtgccaataacgaagaaaaacagagtttccagcttagcgacatcctggccgttttgcgtatcagcaccacctggtattgcagcatggtgatttttggcgtcttcaccatctacgccattctgagttactccaccaactatctgaccgaaatgtatggcatgagcctggtggcggcgagctacatggggattgtgatcaacaaaatattccgcgcgctgtgcggcccacttggcggcataatcaccacctacagcaaagtgaaatcccctacccgcgtgatccaaatcctttccgtactcggcctgctgacgttaactgccctgctcgtcacgaactctaacccgcaaagcgtcgcgatggggattggcctgattttactgctgggattcacctgttacgccagtcgcgggctgtactgggcctgccctggcgaagcgagaacaccgtcttacattatgggcaccacggtaggtatttgtagcgtgattggattcctgccggatgtcttcgtttacccaattatcggccactggcaagacaccctgcccgctgcagaagcctaccgcaatatgtggctgatgggcatggcggcgcttggcatggtgattgtctttacctttttgctgttccaaaaaattcgtactgctgatagcgcccccgcaatggctagcagcaagtaagccaggaaaattacaggagaaaaatcatgagcaaaaaatacatcatagggattgatggcggaagtcagagcacaaaagtggtgatgtacgatctggaaggtaacgtggtttgcgaaggcaaaggcttattacagccgatgcacacgccagatgccgatactgcagaacatcctgacgacgatttatgggcaagtttatgttttgccggtcacgatttgatgagtcagtttgccgggaataaagaagatattgtcggtattggtctgggatccatccgttgctgccgtgcgttattgaaagccgatggcacgcctgctgcgccgttgattagctggcaggatgcacgcgttacacgcccttacgaacacactaaccctgacgtggcatatgtcacctcttttagcggttatctgacgcatcgcttaaccggcgagtttaaagacaatatcgccaactattttggtcagtggccggtggattataagagctgggcatggagcgaagatgctgcggtaatggataagtttaatatcccccgtcatatgctgtttgatgtgcaaatgcctggcaccgtcctcggacatatcacaccacaagccgcactggcgacacatttcccggcaggactgccggttgtttgtaccaccagtgataaaccggtagaagctctgggggccggattactggatgatgaaacggcggtaatttctcttggcacttacatcgcattgatgatgaacggcaaagcactgccgaaagatccagtagcgtactggccgattatgtcttctattccgcaaacattgctgtatgaaggttacggtattcgcaaaggcatgtggacggtgagctggctgcgcgacatgctaggcgagagcttaattcaggatgccagggcgcaggatcttagtccggaagatttactcaacaaaaaagcttcttgtgtgccgccaggctgtaatggtctgatgacggtgctggactggctgaccaatccgtgggaaccgtacaaacgcgggattatgatcggctttgattccagcatggattacgcatggatatatcgtagcatactggaaagcgtggcgctgacgctgaagaacaattacgacaatatgtgtaatgaaatgaatcactttgcgaagcatgtgatcattactggcggcggtagcaacagcgatctgtttatgcagatttttgccgacgtgttcaaccttccggcacgacgtaacgccattaacggttgtgcaagcctgggggcagcgattaatacagcggtaggtctggggctatacccggattacgcaacggctgtcgataacatggttcgcgtgaaagatatctttataccgattgagagcaatgccaaacgctacgacgcgatgaataaaggcattttcaaagacctaaccaaacatactgatgtgatcctgaaaaaaagctatgaagtgatgcatggggaattggggaatgtggatagcatccagagctggagcaatgcgtaagtgaggaaggccgggcgggaaactgcccggcctgaacatacctgaatggttatccccgctgacgcggggaacataagttcgacaacttaaaaaatgataacaagtccggtttatccccgctgatgcagggaacataataaaaactttaactagttcggtttatccctgtttttacaaggaatattaactacactcgatgtctttagaataaaagacaatacgaatcgcactttatcaattttcacttaaagtatgaactggatatctttattcataagaactattcatcaacagcgtatagaggcggttatgtaaaaccactcattagcctcaaaacaaagacaaacttccagatttattacttaaccaatgaataacaagcttaaaaaatatactgttattctaaagaaaaaattaacaggcattaattcaatattaaaaaaataatagattaaaatttcttaacgatttaagaatcatacaaataacactttgattaaatttaattttttgtatcgataattgtgaacctctctggcatggagaactattttgaacatgaggtgttacgtggatatgttgcttattacaagtactgctaatataaaaacttgagaaagagataacgggttatatggtggtttatccccgctggcgcggggaactcgacagaacggcctcagtagtctcgtcaggctccggtttatccccgctggcgcggggaacacctgttttcgcaaatctatggactattgctattcggtttatccccgctggcgcggggaacacgggcgcacggaatacaaagccgtgtatctgctcggtttatccccgctggcgcggggaacactggctctgcaacagcagcacccatgaccacgtcggtttatccccgctggcgcggggaacacgaaatgctggtgagcgttaatgccgcaaacacaggtttatccccgctggcgcggggaacacattacgcctttttgcgattgcccggtttttgccggtttatccccgctggcgcggggaacactctaaacataacctattattaattaatgattttttaagccagtcacaatctaccaactttatagtatcacacaaacaacacatccattatgttaaagagcacttaatccattgattaaaaaggtaaatatttaaaataactctatacaaactaaaatctaccaaactttaccgcaataattttcactccagcgaaaaattaatgccacagaatttgtagagaatgctaatgattagccctggatgggtaaaatggaggagttttcagaggcgacaaacaatataaatgagtagaagtctttacaggttccacccatttataacgcttataaatgtttaatcaggcaatatttagatatttatgtgtttgcatgctcaaacgccaattacgcgcaatgcaggtttcaatgcacaaacgtgtggcatcatccttttggctaatcggctgcagtgcaatgactcgcggtttatcatcggtcagcgttgccagtagttcatccagtgcttcaatatcgcgtacgcgccccactggatgcttgatttcgttggctcgctccagtgcctgactcaacacttcatagccgccgcgcatgttcagctttgggcttacggtaacccaggtattcggtgtgcagcgtacctcatgagtaccactggtttcgatctggcagctaaaaccgttcttttcgagcagatcagtcagtggcagcaaatcatgaatgcaaggctcaccacccgtaatcaccacatgccgcgcggtgtatccctggcgaccaatgacagccagcaaatcttcactgctcgcagccccccacttatcactctctttggtcttcgccagaatgctgaaaagggagacttcccgatcctcaagcttttcccaggtgtgtttggtgtcgcaccaggcacagccaaccgggcatccctgtaaacgaataaaaatggcgggaacgccggtaaagtaaccctcaccttgcagggtctggaacatctcgttaatcgggtactgcatagcattctctgtgaagtggataattgttaattattgcagatcctgccacaacaatcatgtcttattaacattctgttacaggcaggtttaaagaaaaatgcgaaacatatcgttaataattaaagggagtaacgtattatgtcagaagaaaataaagaaaatggatttaatcatgtcaaaacattcaccaaaattatatttattttttctgtattagtttttaatgataacgaatataaaattaccgatgccgccgtcaatttatttatccagatttaatgagaaatttataatgcgctatttcatactaatgttcactttcgtatgttcctttgttgcagcccaaccaactattgtcccacaattacagcaacaagttacggatcttacgagtagcttaaacagtcaagaaaagaaagaactgacgcacaagttagaatctattttcaataatacccaagtgcaaattgccgtattaattgttcccacaaccaaagacgagacaattgaacaatatgctacaagagtttttgacaattggcgtttaggagatgccaaacgtaatgatgggatactgatcgttgttgcctggagcgatcgcactgtccgcatccaggtaggttatgggctggaagaaaaggtaaccgatgctctggctggagatatcatccgtagcaacatgatacccgcatttaaacaacaaaaattagctaagggattagagctagctataaacgctttgaataaccaactcactagtcaacaccaatatccgactaatcctagtgaaagtgaaagtgcgtcttccagtgatcattattactttgctattttttgggtatttgcagtgatgttcttccctttctggttttttcatcaaggcagtaatttttgtcgcgcatgtaaaagtggagtctgtattagtgcaatctatcttttagatttattcctgttctccgataaaattttttccattgctgtattttccttcttttttactttcaccatatttatggtctttacctgtttatgtgtacttcagaaaagagcatctggtagaagttatcatagtgacaacagcggttccgctggaggcagtgatagcggcggatttagcggcgggggcggttcttctggaggtggcggcgcatccggccgctggtaactcaaccataaaaaatgccagcccggaggctggcatttttaaatcagataaagtcagtcttatgcctggcctttgatctctttacgaccgttgtacggtgctttttcgcccagagcttcttcgatacgaatcagctggttgtatttagcaacacggtcagaacggctcatagaaccagttttgatctggcctgcagcagtaccaacagccaggtcagcgatggtagcgtcttcagtttcgccagaacggtgagagataactgcagtgtagccagcatctttcgccatcttgattgcagccagagtttcggtcagagaaccgatctggttgaatttgatcaggatggagttagcgatacctttttcgataccttctttcaggatcttggtgttggttacgaacaggtcgtcaccaaccagctggattttgtcgcccagaactttggtctggtatgcgaaaccgtcccagtcagattcgtccagaccgtcttcgatagaaacgatcgggtactgtttggtcagttcttccaggaagtgagtgaattcttcagaggtgaacgctttgttgccttcgccagccagaacgtatttaccatctttgtagaattcagaagctgcgcagtccatcgccaaagtgatgtctttgcccagttcataaccagcagctttaacagcttcagcgataacagccagagcttcagcgttggaacccaggttcggcgcatagccaccttcgtcaccaacagcagtgttcatgcctttcgctttcagaacttttgccaggtgatggaaaacttcagaacccatgcggatggcttctttcacagttttcgcgccaaccggctgaatcatgaattcctggatatcaacgttgttgtcagcgtgctcaccaccgttgatgatgttcatcatcggaaccggcatagagtatttgcccggagtaccgttcagttcagcgatgtgctcgtacagcggcatacctttagcagctgcagcagctttggcgttagccagagatacagccaggattgcgttcgcgccgaatttggatttgttttcggtgccgtccaggtcgatcatgatcttgtcaatgccagcctgatctttagcatctttgccaatcagcgcctgagcgatcgggccgtttaccgcagcaacagctttggttacgcctttacccaggaaacgggatttgtcgccatcgcgcagttccagagcttcacgggaaccagtagaagcaccactcggagcagctgccataccgacgaaaccaccctccagatgtacttcggcttcaacagtcgggttaccacgggagtcgatgatttcacgaccgatgatttttacgattttggacattaggttttcctcaagtcactagttaaactgaaactccagacaaacaacgcgtacccagggtacgcgttgccgctctaacttttttacttacttcgcctgacgtttctggaactcgctggcggctttcacaaagcctgcaaacagcgggtgaccatcacgtggagtagaagtaaactccggatggaactggcaagccacgaaccacgggtgattcggaacttcgatgatctcgaccaactgatcatccccggaacggcccgcaacgcgcagacctgcatcttcaatctgtttcaacagcatgttgttgacttcgtaacggtgacgatgacgctcaacaattgtcggcgcattgtacagctggcgaaccaggctatcgtcaaccaactggcactgctgtgcgccgagacgcatggtaccgccgagatcgctcttctcgctacgaacttcaacgttgccgttttcatcgcgccactcggtaatcagcgccacaaccgggtacttacagtctggcacaaattccgtagagttggcgttctccatgttggcaacatggcgagcgtaatcaattaacgccacctgcatacccaggcaaatgcccagataaggaatattgttctcacgcgcaaaacgcgcggtcgtaatcatgccttctacgccacgatagccgaaaccgccaggtacgaggattgcgtccagacctttaaggatttcaacgccgcgcgtttcaacatcttgactatcgatcagtttgatgttgacgctgacacgattcttcagcccaccgtgtttcagtgcttcgatcacacttttataagcatccggcagttcaatgtacttgccgaccataccgatggtgacttcacttaccgggttcgcttcttcgaagataacctgttcccattcggacagattcgcttccgggcagtttaagctgaatcgtttacaaatataatcgtccagcccctgagatttcaacaggcccggaattttatagatggaatcgacgtctttcagagaaataaccgctttttccggaacattacagaacaatgcaatcttcgcacgttcgttcgccggaacagcgcgatcactacgacaaatcaggatgtcaggctggataccgatggagagcagctcttttacagagtgctgagtcggtttggttttgacttcaccagacgctgccatgtacggcaccagcgtcaggtgcataaacagagtgtgctcacggccaatttcaacagccatctggcgaatcgcttcgaggaacggcaaggattcgatatcacctactgtaccgccgatttctaccagtactacgtcatgaccttcgccaccttccagcacgcgctctttgattgcgttagtgatgtgcggaataacctgcacggttgcgccgaggtagtcaccgcggcgttctttacgcagaacgtcagagtagatacgacccgtggtgaagttgttgcggcggctcattttggtacgaatgaaacgctcgtagtgccccaggtccaggtcggtttcagcgccgtcttcagtaacgaacacttccccgtgttggattgggctcatagtacctggatcgacgttgatgtacggatccagtttcatgatggtcacattgaggccacgggcttcaagaatggctgcgagggaggctgcggcaatgcctttacccagagaggatacgaccccgccggtcacaaaaatatagttcgttgtcatgctgaacctgagaagttaggttgaaaagacgatggaataaccaagacgggaaagcagtatacccgaacatgacctgtgccacaaactttcattatccctcctcttcgccagcgcactattgaaatcaggagtgagaaaatagcccctttggggtaaatgtttttgacgcaaatcaagcgcttgtcatttaaaaaatgacacaaatggcgcttgaccgcgtaattcccttagagatcaatttcctgccgttttacctgttgccagacttcttccattgtttcgaggtcaacacctgtcatttccagtccacgcgcggcaacaatacgctccacttcgcgaaaacgacgctcgaatttttcgttcgctttttgcaatgcgatttctgctttcgtccctaaatggcgagccagattaaccgtggcaaacagcaggtcccccatttcctcctccagtttagcctggtcgacaacagcctgccgcgcttcgtacatcacctcgtcgatctcttcgtagactttatcgactaccggaccaagcgtcgtccaatcgaagccaacgttggcgcaacgtttctggattttttgcgcacgcattaaagccggtaaactacgaggaatatcgtccagcgcgctatgctgcgctttctgcgcgcgctcttcggttttgatttgctcccaacgggcaagcacttcactactgttttcggcagaactatcagcaaaaacatgcggatggcgacgctctaatttatcgctaatagcagcgcaaatatcattaaagtcaaagcgcccttcttcctgagccatttgcgcgtaaaacaccacctggaatagcagatcgcccagttcaccgcgaagatcgtcaaaatcttcacgggcgatggcgtccagcacttcgtaggtttcttcaagggtgtaaggcgcaatggtggcaaatgtctgctctttatcccacgggcagccgttttccggatcgcgcaggcgctgcataatagtgagcaaacggtcgatttgattcattgaattgtcctgaaaattgcgggtctgtcaggtggaaacctgtgaccagaatagaagtgagttagtaacattacccaatcagtacgttaattttggctttaatgagttgtaattcctctggggcaactgttcctttcttcgttgctcctcttgcccgccaggcgatactttttacctgatcagctaacgctacgccatcacgttcctgaccggataaaacaacttcgaacggatatcctttactttgcgttgtacaaggaacacacagacacatacctgttttgttgttgtacatgaaaggactcaggacaacagctggacgatgtccagcttgctcgctaccttttgtcgggtcaaaatcaacccaaatcagatcgcccatatcgggtacgtatcggcttaccattaccagacttccttatctttcggctctccccagtcgatattctcgtggaggttttccggcgtgatgtcgttgaccagttcagcaagcgtaaatacgggctctttacgcactggctcaataattaatttgccatccaccaggtcaatcttcacttcatcatcaatattcagattgagcgcctgcattaacgtagccgggatccgcaccgccggactatttccccaacgctttacgctactgtggatcataaccctttcctcaaaccgctatcatatgtagatacagtatatatcaatctacattgtagatacgagcaaatttcggcttaactcccgtgcaaccgacgcgcgtcgataacatccggcacctggttgagtttacccagcacgcgccccagcacttgcaggttgtaaatctcaatggtcatgtcgatggtcgccagttgctgtttggtgtcgctacggctggcaacgccaagcacgttcaccttctcgttggcgagaatggtcgtgatatcacgtaacaacccactacgatcattagctaccacgcggaccaccaggctatatccggcggagtagctctcaccccataccgcgtcaacaatgcgttctggcgcatgggagcgcagttccgccagttgttcgcaatcggcgcggtgtacactaataccgcgcccctgggtaatgaagccgacaatctcatctccaggaatcggctggcagcagcgcgcgatgtggtgcatcaggttgccaacaccttcgactaccacgcgaccgttatctttactgcggttttgcggcgtgtagcttttttgctgaagttgcttcagcgcggcggcgtcctgctcttcggcactcggcttattaaattggctttgcaggaagttcaccatctgattgagacggatatccccgccaccaatcgccgccagcaactcgtcgacatcattgaagttgtaacgcggcagcagatgtttttctgcttctttcaggctgatccccagatgttccagctcgtcgtcaaggatttgccgcccagccagaatgtttttgtcacggtcctgtttacggaaccaggcgtgaattttgctacgcccacggctggttgtgacgtaaccgaggtttgggtttaaccagtcacggctggggttcggctgtttctgggtgataatttcaatctggtcgcccatctgcagctggtaggtgaacggcacaatgcgcccgccaatttttgccccgatgcagcggtgtccgacatcactgtggatgtggtaagcgaagtccagcggcgtacttcccgcaggcaaatcaacgacatcacctttcggcgtaaagacgtacacccggtcgtcaaagacctgactacgtacttcgtcgagcatttcgccggaatcagccatctcttcctgccacgcaatcagtttacgcagccaggcaatccggtcttcatgtccgctacgtgcgccgccagcagccgcgccctctttatatttccagtgcgcagcaacacccaactctgcatcttcatgcatctgtttggtgcggatttggatctcaacggtttttccacccggccccagaaccacggtatgaatagactgataaccgtttggtttcgggttagcgacgtaatcgtcaaactcatccggcaggtggcgatagtgagtgtgcactatccccagtgcggcatagcaatcctgtaaacgctcggcgacaatacgtaccgcacgcacatcaaacagctcatcaaaggcgaggttctttttctgcattttacgccagatgctgtagatgtgtttcggacgaccatacacttccgctttaacgccttcagctttcatctcagcgcgcagatgaccaacgaactcttcgatgtagtgttcgcggtcgagacgccgttcatgcagcagtttggcaattcgtttgtattcggttggatggaggtaacggaagcagtaatcttccagttcccatttcagttgtccgattccgagacggttagccagcggtgcgtagatgttggtacactcttttgccgccagtacacgttcatcttccggcgcatcttttacttcgcgcagatgagcaatacgctccgccagtttgatgactacgcagcgaaaatcatcgaccatcgccaataacatccggcgaacgttatcgacctgttcggaggaaacagaatcagtgtgcgtcgctttcagctggcggatcgccgccatatcacgcacgccgtgaataaggttaacgacgctcttaccgacgctctcacgcagcacatcttcgctgactacgttggcatccgccagagggaaaagcagcgccgcccgcagcgtgtcaatgtccatacttaatgtgctgaggatctccaccatctcaacaccacgccacaataacagactggcatccggatgcccctgcgtctgttgcagacaatacgcccaggtttcggctaagcactcacagctcttctggctggtaatacccagacttgcgatccatttttccggatcaaattcaccagccttattgatatgtgcacttcttaccgcaaccatcgtcctctcctttagggaccagacctgccgaaatcggcaaatcgcaattatttaacgcggctgaaaagtaccatgctttccagatgtcccgtgtgtgggaacatatccagcatcgccagtcgcgcaatggtatatcctgcttttaataacgcttcgctatcccgagccagcgttgcagggttacaggatacataaactatacgaataggttccagttttataatttgctgcataacacctgcggcacctgctcgcgccgggtccagcaacactttatcgaagccgtttttcgcccacggctgctttgtgacatcttcttcaagattttcgtgataaaacgtcacattctgtaagccattaagacgcgcattctgctggcctttttccaccagcgccggaacaccttctacaccgaccacactggcagcttgtgtcgccaatggcagtgtaaagttgcccataccgcagaacagatccagtacgcgatcttcaggttgcacatccagccattccaacgcacgcgctaccattttttggttcacacccgcattgacctgaataaaatcgcgcgggctaaaagttaagcgcaacccgttactgtcataccagggcatctcaccagagacggtttcgagtatctcactatcgggggcgagatacagatccaggccttcagaatggctaaagcgttccagtttttcgcgatctgcgctacttagcggtgcggtatggcgcaaaatcatcagcgtgccgctggttgcctgtaccagttcaacatgaccaagatggcgcatagcttgtaagctgcccagacatgccctgactttgggcagcaatgcttcaagttggggcgctaaaatggggcattgtttgacgtcgacaatgtcactggagcccgctttgcgaaaccccatctgaagttgctgtgttttcggtaagtagttcagacttaaacgcgcgcgacggcgatagccccagggaacatcggcgatcacttcagagacatcgtgtttcattaatcgggcgagtgccgcacttttgcttcgctgctgtaaatccacgctggcgtgttgttgctgacagccaccgcatacgccaaaatgaggacagcgtggcgtttcgcgttccgggctatcgcttaaccggcgtacgactttagcgcgggcatactgttttttatcttcagtaacagtaacttccgcgttttcctgcggcaataatccggggataaatagcgttttgccgttatgtcgcgccacgccctgaccaaaagagtcgaggtcgttgacactaacggttatgatctgacgcgtcgtcgtgcgtcgttttgcagagtagaattgcgccattggcgagactttctcaatttaacagtgtgaccttaattgtcccataacggaactccatgaccaactacagcctgcgcgcacgcatgatgattctgatcctggcaccgaccgtccttattggtttattgctgagtatctttttcgtcgtgcatcgctataacgacttgcagcgtcaactggaagatgccggtgccagcattattgagccgcttgcagtttctactgaatatggcatgagcctgcaaaatcgcgaatctatcggtcagttaataagcgtactgcatcgtcgccattccgatattgttcgcgcgattagcgtttatgatgaaaataaccgactctttgtcacctccaattttcatcttgatcccagtagtatgcagctcggcagcaacgtgccgtttcctcgccagctcactgtcactcgtgacggcgatattatgatcctccgcacgccgattatttctgagagttactcccccgacgaaagccccagtagcgatgccaaaaatagtcaaaatatgttgggatatattgcgctggagctggatcttaaaagcgttcgcttgcagcaatataaagagatctttatttccagcgtgatgatgctgttttgtatcggtattgcgcttatttttggctggcgcttaatgcgcgatgtaaccggtccgattcgcaacatggtgaataccgtcgaccgcatccgtcgcgggcaactcgacagccgggtggaaggatttatgctcggcgagctggatatgctgaaaaacggtatcaacagcatggcaatgagcctggctgcttatcacgaagagatgcagcacaatatcgaccaggcgacgtccgatctgcgtgaaacgctggagcagatggaaattcagaacgttgagttagatctggcgaaaaagcgcgcccaggaagcggcgcgtattaaatccgagtttctggcaaatatgagtcacgagctgcgtacaccactgaatggtgttattggctttacccgcctgacgctgaaaacagaattaacaccaacgcagcgcgatcacctgaatacgattgaacgtagcgcaaataatttgctggcaattattaatgatgttctcgacttcagcaaactggaagcaggtaagctgattctggaaagtattccattcccactacgcagcacgctggatgaagtcgttactctgctggcacattcttctcacgataaagggttagaactgacgctcaatattaaaagcgacgtgcctgataacgtgatcggcgacccgctgcgattacagcaaatcatcactaacctggtggggaatgcaattaaattcaccgagaatggcaacattgatattctggtagaaaaacgtgcgctgagtaataccaaagtgcagattgaagtgcagattcgggataccggcattggtattcctgaacgcgatcaaagccgcttattccaggccttccgacaggctgatgccagtatttcccgccgtcatggtggcaccgggctggggctggtgattacacaaaaactggttaatgaaatgggcggcgatattagcttccatagccagccgaatcgcggtagtactttctggttccacattaatctcgatctgaacccgaacattattatcgaagggccatccacccagtgcctcgcaggtaagcgcctggcctatgtcgaaccaaactccgcagcagcgcaatgcacgctggatattttaagtgaaacgccgctggaagtggtttatagcccaacgttctccgcgctgcctcccgcgcattacgacatgatgttgttaggcatcgcggtgaccttccgcgagccgctaacaatgcaacatgagcgattagcgaaagcggtaagcatgaccgatttcctgatgctggcacttccttgccatgcacaagtcaatgctgaaaaactcaagcaagatggtatcggcgcgtgtctgctgaaaccattaacacctacacgcctgttgcctgccctgacggaattttgtcatcacaaacaaaacacgcttttgcctgtaaccgatgaaagtaagctggcaatgacagtcatggcggttgatgacaaccccgctaacctgaaacttatcggcgcattgctggaagatatggtgcaacatgtggaactttgcgatagcgggcatcaggcggttgaacgggcgaaacagatgccgttcgatttgatcttaatggatattcaaatgccggacatggatggcattcgggcctgcgaactcatccaccaactcccgcatcagcaacaaacgccggttatcgcggtaacggcgcatgcaatggccgggcaaaaagagaagctgcttggcgcagggatgagcgattatctggcgaaaccgattgaagaagagcgattgcataatttgttgttgcgctacaagcctggcagcggtatttcctctcgcgtcgtgacgcccgaagtcaacgaaattgtggtgaacccgaatgcgaccctcgactggcaactggcactacgccaggcagcaggaaaaaccgatttagcgcgcgatatgctgcaaatgttactcgatttcctgcctgaagttcgcaacaaagttgaggaacagctggttggagaaaacccggaaggcctggttgatttgattcataaactgcatggcagttgcggctatagcggtgtgccacgtatgaagaatctctgccaactgatcgaacaacagctacgtagcggtactaaagaagaagatttggaaccggagctgctggaactgttggacgagatggataatgtcgcgcgcgaagccagcaaaattctcgggtaatggatgtcttgtcgagtagcaatcggctttttatgacgctggtttcagattggtgacaaagtgcctgtgtttatgccggatgcggcgttaacgccttatccggcctacaaaaccaattaaattcaatgaattaaaaaatgatgtagacctgatacatagcacaacaggctattttgcgtttagcatcagtctcaaaccggctccagatagagccggttttggttttctgtcttaacgcaccatgcacgggcgcttgttatcgaacgtccagccaggaatcagatactgcattcccatcgcatcgtcacgcgcgccaagcccgtgtttctgatacagctcatgggctttcatcacttgatccatatcgatttctacacccagccccggtttttctggcacctgtaccagcccgcctttgatctcaaacggttctttggtcaggcgctgattgccttcctgccaaatccagtgcgtatcaatagcagtaattttacccggtgcagcggcggcaacatgggtaaacatcgccagggaaatatcgaagtggttgttagagtgactaccccaggtcaggccaaattcatggcacatttgcgccacacgtacgctaccttgcattgtccagaaatgcggatccgccagcgggatatcaacggattgcagggagagcgtatggcccatttgccgccagtcggtggcgatcatattggttgcagtcggtagacctgtcgcgcgacggaactctgccatcacttcacgcccggagaaaccttgctccgcaccacacggatcttctgcataagccaggctacctttcaggtatttaccgattttaatcgcttcgttcaggctccaggcaccgttaggatcgagcgtaatacgcgcctgcgggaagcgttgcgccagtgccacaatagactcggcctcttcttccccggccagtacaccgcccttcagtttgaaatcgttgaagccatatttttcatatgccgcttccgccaggcgcaccaccgcatccggcgtcatcgcttcttcatgacgcaggcgataccagtcgcaactgtcatccggctggctttgatacggcagcggcgtggctttgcgattaccgacgaagaacagataaccgagcatttcgacttcgctacgctgttgaccatcgcccagcaggcttgccacgtttacccccagatgctgccccagcagatccagcattgccgcttctatcccggtaactacatgaatagtggtacgtaggtcaaatgtctgcaaaccgcgcccaccagcatcacgatcggcaaaagtattacgcaccagcgtcagaacgtttttgtattcacccagcgttttacctaccaccagcggaatcgcatcttccagcgttttacggattttctcgccgccgggaatttcccctacgccagtgtgaccagaattatctttgataatcacaatattacgcgtaaagaacggtgcgtgtgcaccactcagattcatcagcatactgtcatgacccgccaccgggataacctgcatttcagtaacaacaggcgtcgtaaattgagaactcatatttatgtcctttttcagaatcaatgacggccgaaaacgggacgtttacggtcaaaggtccagccggggatcaggtactgcatcggacctgcgtcgttacgcgcaccgccaggcagacgtttataggcctcatgtgccttttgtacctgttcccagtccagttccacgcccagaccgggcgcatcaggaacggcaatttttccgtttttaatctccagcggattttgggtcaggcgacaatcgccctcctgccaaatccagtgggtatcgatagcggtaggattacccggtgccgccgcgcccacatgggtaaacatcgccagagagatatcgaaatggttattagaatggcagccccaggtcagcccccagtcgtcgcaaagctgcgccacacggactgcaccggaaagcgtccagaagtgcggatcggcaagtggaatatctaccgcattgagcatcaccgcatgacccatttcgcgccagttggtggcgatcatgttagtcgcgacgggcaagccggtcgcccgtcgaaattccgccatcacttcacgtccggagaagccctgttctgcgccgcatggatcttcggcataggtaagaacatcattcagccctttgcataaagaaatggcttcatcaagcagccatgcaccgttgggatcaacggtaatccgcgcatccgggaagcgtttcttcaatgcacgaacagtgtcgatttcttgctcgccaggtaacacgccgcccttaagtttgaaatctttaaagccgtagcgatcctgactggcttccgccagacgcacaacggcttcgctgttcattgctttctgatgccgcaactgataccactcatggttgcccggcgtattttccacataaggaagatcggttttggtccgatcaccgatataaaacagataaccgaggacggtaatagcctcgcgttgcttgcctggccctaacagttcgcagaccggaacattcagcgccttacctagcaggtcaagcaaagcggcttccagcgccgccacggcgttaacgcgtaattcaaaggtccaggcacctttaccgaaggtatcaaaatcggcggcctgattacctttatgcacctgctggaccactttattcagtcgcgcaacttcctggcccagaaccatcggaatagcatcgacaagcgtctgataaatcacatctccgcccggcgcttcaccaatgccggtatgcccggcgttatcggtgagtaccacaatattgcgggtgaaatatgcgttatgtgccccaccaatattaagcaacatgctgtcatgcccggccaccggaatgactttcatatcagtaataacaggactggattgtgtcgccatcttattgccccgcaacaggtttcaactcgatacgcttgatatcgcccaccagcaccaggtagctcagtaccgcgattaaggcatgaacaccaacataaatcagcgccccattaaagctgccagtcgtgccaacgatataaccaattgcgattggcgtgacgatgccagaaatgttaccgaacatgttgaacaggccaccggaaagaccgctgatctcttttggcgcggtatctgccattactgcccaacccagcgccccgatgcccttaccgaagaaggccagcgccataaagccgatgatcatccactcaacgttgacgtagttgcagaacaccatcaccatgctcagcaacatgcccattacgatcggtgttttacgcgcaatgttcaggcttcccgtgcggcgcatcagccagtcggaaataatcccacccagcacaccgccgataaaaccgcaaaccgccggaacggaagccacaaagcccgctttcagaatgctcatcccgcgtgcctgcaccagataaaccgggaaccaggtaataaagaagtaagtcagggcgttgatacagtactgaccgatataaacgccgatcatcatccgactccctagcagctgtttgatctgcccccacttcacgctgaacggcactttaactttggtgttttgctgatccatattgatcagcgcaccacccgcggcgatgtactccagctctttcttatttacccccggatgttgatttggctcgtggatgactttcaaccagataaagctgatgacaatccccagaccgcccataaagaagaagacgtgactccagcccacttcatgcgtcagccagcccataatcggcgcgaagatcaccgttgcgaagtattgagcggagttaaaaatgctcaccgccgttcccctttcctgcgccggaaaccaggccgcaacaatgcgactgttgccggggaaagatggcgcttcagcaagcccgaccaggaagcgcagcgtaaacagggcaacgataatgccgaatccactaaagatatcgacgaagccttgcagcaaggtaaacatgctccagataaagatgctccagaagtagacgcgtttactaccaaaacggtccagcaaccagccaccagggatctgcccgataacataagcccaactgaaagcagagaacacatagcccattcccacgggatcaaggccgatatctttggccatttcgctaccggcgatagagagcgtagcgcggtcgccgtagttgaaggatgtgacgataaacaacatcaccactatccagtaacgagcatttgtgcgtttttccacactgctcgcagcctgacttaaagaactcattgttgcactcctgaaaattcgcgttagccacgctcactctggactgcgacatcgccaggaaatcagaggtgacgtagggtgttttttgccgtttttataggtcgttcgccgaatacggcgcgtgtttatatctggcaatagcagtataaaaagcgcgccatagcggctcaccgtgcaacaacacaacattaatgcgttcaatgaggcccgattttggcattagccctggacggtggaatccacttcacggaaatgaaaacaagaacaagaaaggaagggttaaaacgaagaaataaagaagagtatgaaatggatcgcttgactccaggcaaacgccagtaaaaatccgcgctatgaagcagtttttactggcatttgcctgaaaagattcgattcagcaccgctaaaacgacatttaccgctcgctgaacatatcaggacaacagcgtgccccactgttcgacccacggattactttccgtttccggttccgggttctcactggcgtcaatcaacagcatttcgccaacccgctgagcgctctgttcctgcaacaaggcatcgaactgtttgccgccattgcagaaattcacataactactgtcgccgagcgcaatcacgccataacgcagattcggctggaagcccagactatctttgattccctgaaagagtggcacaatgctatcaggaaggtcgccctgcccggtcgtggacgtaaccaccagaacatacttatcctgatagggcagccagtcgcttaattcaggatcttcaaataccgttgctttgtggccctgcgcggtcagaatcgcttccgcttcttcggccactaacagactattcccgtacatggtgccgacaaaaataccaatttccgccataccgttttctccctggattaggaacttatctctccatcctgaccgcttggcgcactgaactcaaccctttcattttcaggaagcagaccgcgccagccaaattgacttaacgcctgcatccaggtgtcgtccaggcccgcgtgaatagtcagcggctcgccagtaaaaggatgcgtcaaactcaactgactggcatgtagcattaaccgctggaggccaaaatgctcagcaccgctgcgattctggcgtaaatcgccatgtttgctatcgccaataatcggatgacgcaaatgggcaagatgtcggcgaagctgatgtttgcgtccggttttcggctccagttccaccaggccgtagcgcgtggtcgggtaacgtccggtcgctaccggcatttctacggtcgccagaccgcgataatgcgtcactgctggctgcgggcctttatcttcgcgggcaaatttatcagcgattttgtccagttcttccaccagtggataatccagcaccgcttcttccatcaaccagccgcgcacaatcgcatggtaacgtttctggatttggtgctgttcaaactgttgtgccagcagccgtccggcctcgctggataatcccatcaacaacacaccagaagtgggtcggtccagacgatgagcagtaaaaacatgctggcctatctggtcacgcacggtttgcatgaccactactttctcgtcgcgatccagccagctgcggtgaaccagccagccggagggtttatttaccgcaaccagccattcatcctgatagagtatttccagcattagctcgcatcatccgcaaaaagagcatccagtttttccagctcagccagaataagcgcgcgttgcggatggtccgtcgccagcgccatttcataatagggtgcaacggcaaaagcgcccggtaacggctgtttgttatctaacaaatcgtgcattcgcgggatcagcacccactgcaaccactccagtggttccatggtgtccataaagaacggttgggtactattaaattgatgcggctggggttcatcgtttcgccagtgctgatgttcacgcagtaacgcttcaagcgcctgcaactggagacgaacgcggtcatgagtggtcataaagcaacctcaataagaaaaactgccgcgaaggatagcaggaataaaaaaagggagcactgtattcacagcgctcccggttcgtttcgcagcattccagctacttttgttgctccctgctcatccttgacaacttttcctctggccttgcggccaatcgttcatcctgaactattgcttcctgctcacaccaccccgatgtgatacttcatcctgaagtgtccctggccttcctgacccaccgaatcatcctgaccggttctcattctccatcctggaggtgtcctttaacgcgtcctgcgtcatcctcttcgcttcatccagaagcctttccctgaaacaccatcctggtgtgtcctgcagaagtgtcatcatcctgatgttcacttcgttgtctgactccctgtcgacgaagatagaatcgtctttttcgcgaagtcttacaaggcgcttacagacaatgccttaaggaaaatttcatatgaaagttaagaattaacaatcaacattttgattttaaatgaaaataacgattcttatctttttaagtattcgcttatttcctggcgatctcctacagagtctgtaagagatctctcacaaccagatggggtatttggattacagaagaggcttaagttgattaaggaattccgcaagattactggctaaatgcgtccgtttacgtgttcccagcgtctctttgcacacttcaccggagagattacacacgctgatgacctctaactcttcttccagcgtcgcgataaatagtgtgggcggcagttttagccttttctgagtcaccagatgaccaatcagattttcctgcacccgacggaagtcgtcttcactccaggtttgcagcaatgtcagtttgatatcgccaaactgcgcgtgcatatccccggcaaactgagtcgtataaaaggtatgaattgtgggttgtatcacaatatcaaaagcgcgttcaaccgcgtttacattttgttccccggtaaacggctggggttgccagtatacggcatcttcggtagtactaataatgcacggactaggaacaccgtacagttcctcacttaacggccagcttttatgctcttcatgccacgcatcgcagtagcgtgcagtaaaatctttcagggcttgtgcggtcaaatcgtccactaatttctctcttcacttaaaccagatacacttgtcgtttagtttatctggtttatgacggtgaaacatgtcttcttatgcaaaccatcaggcacttgcgggcctgactcttggaaaaagtaccgattaccgggatacctatgacgccagcctactgcaaggcgttccacgcagcctgaatcgcgacccgctgggtctgaaagcggataacctgccttttcacggtacggatatctggacgctgtatgaactttcctggctgaatgcgaaaggtttgccgcaggtcgctgtcggtcatgttgaacttgattacaccagcgtaaatctgattgagagcaagagttttaagctctatctcaacagttttaaccagacgcgttttaataactgggatgaggtgcgccagacgctggagcgcgacttaagcacttgcgctcagggtaagattagcgtggcgttatatcgtcttgatgaactggaaggccagccgataggtcattttaatggcacttgcattgatgaccaggatatcactatcgataactatgaattcactactgactatctggagaatgccacctgtggtgaaaaagtagtggaagagacgcttgtcagccacctgctgaaaagtaactgcctgatcacccatcaaccagattggggtagcctccaaattcagtatcgtggacgccaaattgacagagaaaaactgctgcgttacctggtcagtttccgtcatcacaacgagttccacgaacagtgcgtggaacgcatctttaatgacctgttacgcttctgccagccagaaaaattgagcgtttacgcacgttatacccgtcgtggcggtctggacattaacccgtggcgcagtaatagcgattttgtcccaagcaccacaagactggttcggcaataaattttttctcaattttgcgtgctggattcacgcagaaggttgtgaaaggtcatcaggcagggctattgtaatcaaagggaatgacgatattcgtcccataaggagtttttcttgattacacatattagcccgcttggctccatggatatgttgagccagctggaagtggatatgcttaaacgcaccgccagcagcgacctctatcaactgtttcgcaactgtagtcttgccgtactgaactccggtagtttgaccgataacagcaaagaattgctgtctcgttttgaaaatttcgatattaacgtcttgcgccgtgaacgcggcgtaaagctggaactgattaatcccccggaagaggcttttgtcgatgggcgaattattcgcgctttgcaggccaacttgttcgcggtcctgcgtgacattctcttcgtttacgggcaaatccataacaccgttcgttttcccaacctgaatctcgacaactccgtccacatcactaacctggtcttttccatcttgcgtaacgctcgcgcgctgcatgtgggtgaagcgccaaatatggtggtctgctggggcggtcacagtattaacgaaaacgagtatttgtatgcccgtcgcgtcggaaaccagctgggcctgcgtgagctgaatatctgcaccggctgtggtccgggagcgatggaagcgccgatgaaaggtgctgcggtcggacacgcgcagcagcgttacaaagacagtcgttttattggtatgacagagccgagcattatcgccgctgaaccgcctaacccgctggtcaacgaattgatcatcatgccagatatcgaaaaacgtctggaagcgtttgtccgtatcgctcacggtatcattatcttccctggcggtgtgggtacggcagaagagttgctctatttgctgggaattttaatgaacccggccaacaaagatcaggttttaccattgatcctcaccggcccgaaagagagcgccgactacttccgcgtactggacgagtttgtcgtgcatacgctgggtgaaaacgcgcgccgccattaccgcatcatcattgatgacgccgctgaagtcgctcgtcagatgaaaaaaagcatgccgctggtgaaagaaaatcgccgtgatacaggcgatgcctacagctttaactggagtatgcgcattgcgccagatttgcaaatgccgtttgagccgtctcacgagaatatggctaatctgaagctttacccggatcaacctgttgaagtgctggctgccgacctgcgccgtgcgttctccggtattgtggcgggtaacgtaaaagaagtcggtattcgcgccattgaagagtttggtccttacaaaatcaacggcgataaagagattatgcgtcgtatggacgacctgctacagggttttgttgcccagcatcgtatgaagttgccaggcagtgcctacatcccttgctacgaaatctgcacgtaatctccgctcccccggtgacgtttgttgccgggttttctcgtttttggtcacttactcatcaactcatttcatttgttatatgaatgtttcttaccaccctcacgcgacaaatatcatcacagttaatatgtcatacaatttatgttgcaacgcaaacgtttccctattttcataaaccgtattttatcgctatgaaaaagaaattatcgccatgattaactaaaagtattgattttttcagttcaacctacatatattgcgcgccccggaagaagtcagatgtcgtttaatgggcaaatattgcccttaaattctcttttacttttgatttacagagtaaagcgttgggataatctatcttccaagtagattattgtatttgagatcaagatcactgatagatacataacttgtgtgtatctttccgccctcaaattattacggcggtaaatgattaagccatcgccgatagacagatttcatttttacggtcaggcaccttcccgggctgaactggctaaaagctgaattatttgcattcctccaggagaaatagatggaaacgactcaaaccagcacgattgcgagcaaagactctcgtagtgcctggcgcaagacagacaccatgtggatgctgggcctttacggcacggcaatcggcgcgggcgtgctgttcctgccaatcaacgccggtgttggcggtatgatcccgctgatcatcatggctatccttgcgttcccgatgacgttttttgctcaccgcggcctgactcgcttcgtactgtctggtaaaaacccgggcgaagacatcaccgaggttgtagaagaacactttggtattggcgcaggtaaactgattaccctgctctacttcttcgctatctacccgatcctgctggtttatagcgtggcaatcaccaataccgttgaaagcttcatgtctcaccagctgggtatgacgccaccgccgcgtgcgattctgagcctgatcctgatcgtgggtatgatgaccatcgttcgcttcggtgagcagatgatcgttaaagcgatgagtattctggtattcccgtttgttggcgtactgatgctgctggctctgtacctgatcccgcagtggaacggcgctgcactggaaacgctgtctctggacactgcatctgcaaccggaaacggtctgtggatgaccctgtggctggcaattccggtaatggtgttcagcttcaaccactctccgatcatctcttctttcgccgttgcgaagcgtgaagagtacggcgatatggcagaacagaaatgcagcaagatcctggcattcgcacacatcatgatggtgctgaccgtaatgttcttcgtcttcagctgtgtactgagcctgactccggcagacctggctgcggctaaagagcagaacatcagcattctgtcttacctggctaaccactttaacgcaccggttatcgcgtggatggctccgattatcgcgattatcgctatcaccaaatccttcctcggtcactacctgggcgcacgtgaaggcttcaacggtatggtgattaaatctctgcgtggtaaaggtaagtctatcgaaatcaacaagctgaaccgtatcactgcgctgttcatgctggtaacgacctggattgttgccaccctgaacccgagcatcctgggtatgattgaaaccctgggcggtccaatcatcgcgatgatcctgttcctgatgccgatgtacgcaattcagaaagtaccggcaatgcgtaagtacagcggtcacatcagcaacgtattcgttgtcgtgatgggtctgattgcaatctccgcaatcttctactctctgttcagctaagtcctttcgcgccgctttcgggcggcgcttcctccgttttaacgcgatgtatttcctatgattagcgtattcgatattttcaaaatcggcattggcccttccagttctcataccgttggaccaatgaaagcgggtaaacaatttaccgacgatctgattgcccgtaacctgcttaaagacgtgacccgcgtggtggttgacgtgtacggcagcctctctctgaccggtaaaggccaccacactgatatcgccattattatgggcctggcgggtaacctgccggataccgtggatatcgattccatccccagttttattcaggatgtgaatactcatggtcgcctgatgctggcaaacggtcagcatgaagtggagttcccggttgatcagtgcatgaacttccacgccgacaacctttctctgcatgaaaacggtatgcgcattaccgcgctggcgggcgataaagtcgtttacagccagacttactactctattggcggtggctttatcgttgatgaagagcattttggccagcaggatagcgcaccggttgaagttccttatccgtacagtagtgcagccgatctgcaaaaacattgtcaggaaaccgggctgagtctctctggcctgatgatgaaaaacgagctggcgctgcacagcaaagaagagctggaacagcacctggcgaacgtctgggaagtcatgcgcggcggtattgagcgcggtatttccaccgaaggcgtgttgcctggcaaactgcgcgttccacgccgtgctgcggcactacgccggatgctggtcagccaggataaaaccaccactgacccgatggcggttgttgactggatcaacatgtttgcactggcagtgaacgaagagaacgctgctggcggtcgcgtggtgactgcgccgactaacggtgcgtgcgggattatcccggcagttctggcgtactacgacaagtttatccgcgaagtgaacgctaacagtctggctcgttacctgctggtagccagcgccattggttctctttataagatgaacgcgagcatttctggtgctgaagtgggttgccagggtgaagttggcgtggcgtgcagtatggcggcggctggtctggcagaactattaggcgcaagcccggcgcaggtgtgcatcgcggcggaaatcgccatggagcacaacctcggtctgacgtgtgacccggtcgccggacaggtacaggtgccatgcatcgagcgtaacgccattgcggcagtaaaagcggtgaacgccgcacgtatggcgctgcgccgtaccagcgagccgcgcgtctgcctcgataaagttatcgaaaccatgtacgaaacaggtaaagatatgaacgccaagtaccgcgaaacctctcgcggcggcctggcaatgaagatcgttgcctgcgattaatcgctctccaaaggcctcgttttgcgaggcctcttcccgatttctcatccagccgtagcctgttccggcatcgaatgttacccttatcgcctgatctttaagggggttatcgtggctgttcatttgcttattgtcgatgcactgaatcttattcgtcgcattcatgccgttcaggggagcccctgtgtcgaaacctgccagcatgcgctcgatcagctcattatgcacagccagccaacccacgcggtcgccgtttttgatgatgaaaaccgcagtagcggctggcgtcatcagcgtttaccagattacaaagcgggtcgaccgccaatgccggaagagttgcacgacgagatgcctgcattacgcgccgcctttgagcaacgcggcgtcccgtgctggagtaccagcggcaacgaagccgatgacttagccgccacgctggcggtcaaagtgacacaggccgggcatcaggcaacgattgttagcacagataaaggctactgtcagttacttagtccgacattacgtattcgtgattacttccagaaacgttggctggatgcgccatttatcgataaagaatttggcgttcaaccgcagcagttgcccgattactggggacttgcggggatcagcagtagtaaggtaccgggtgttgcgggaatcggaccaaaaagcgccacgcagctgctggtcgagtttcagagtctggaagggatatatgagaatctggatgcggttgccgaaaagtggcgcaaaaaattagaaacccataaagagatggcgtttctgtgccgcgatattgcccgcttacaaaccgatttgcatatcgacggcaatttacagcaattgcggttggtacggtaacggcgagccggatacgccgcaaacgtcgtatccggcattatcacatcagcgcatttaccaggcggtatggtaaagctctacaatatcctcaagcgttgcttcacgcgggttgccaccggtacaaacatcatccagtgccgcctgcgccagtgccggaatgtcttccttgcgtacaccaacatcacgcaaatgtggcggaataccgacatcacggttgagagcaaacaccgcttcaacagcggcattacgcgcctcttccaggctcataccttccactttcacgcccataacgcgcgcgatatcgcggtacttctcaccggtaaagtcagcgttataacgcatgacatgcggtaacaggatggcgttcgcaacaccgtgtggagtgttataaaacgcgcccagtggatgcgccataccatgcaccaaccctaacccaacattgctgaagcccatacccgcaacatactgcccgagcgccatttcttctccggcatccttatcaccagcaacgcttcctcgcagcgccccagcaatgatttcaatcgctttaatgtgcagtgcatcggttagcgcccacgcgccacgggtaatatacccctcaatagcatgagtgagcgcatcgacacccgtcgcagctttcagcgctggaggcataccatccatcatgtcagcgtcaataaacgccacctgcgggatatcatgcggatcaacgcaaacaaacttgcgccgtttctcttcgtcagtgatcacgtagttaatggtcacttctgccgcagtacctgctgtggtaggaattgccagaatcggtacactgggtttattggtcggggaaagcccttccaggctacgcacatcggcaaactccgggttgttgctgataatgccaatcgctttacaagtatcctgtggagaaccaccaccaatagcgatcaggtaatccgcgccgctattctggaatacaccgagcccttctttgacgacagtaattgttgggttgggcactacgccgtcgtaaatcgcccatgccagccctgcagcatccatcttatcggtcactttcgccaccacgccgcattgcaccagcgttttatcggtgacgatcagcgccttctgataaccacggcgtttcacctcatcggttaaagccccaacagcaccccgaccaaaccatgccgtttcgttcagaatcattctgttagccatcatccttctccttgttgctttacgaaattactcttcaattcgtaacccataggttttgaatttctccagcactacggcaatctcttcatcgctcagcactggcaccgggtccgtaatcgccagggtcgtcaggtaaagttgcgccagcacttcaacttcatgcgccagccataacgctttttccagattcacctcacaagcgataagcccatgatgttgtaacaaagttgccttacgatttttgagagccagcgcaacatgttcagaaagttcgcgtgttccaaaggtcgcataaggcgcgcaaggaatagaattaccgccagccgccgcaatcatgtagtgaatagcggggatgcttcggttaagaatggaaactgccgtgcaatgaacggcatgattgtgaacaaccgcgttggcatccggtctgctttgataggctgccatatggaaacgccattcgctactggggagctttccttcctcatgtttaccgttgccatcaataaagacaatatggctctccgtcagtttttcatatggaatgcctgtaggcgtaatcagcatcccatcctgataacgtacactgacgttccccgctgtcccctggttcagtcccaggcgggtcatttccaggcaagtgtcaataatctgacgagcaagtttatttcgttccattagctacctctctctgattcaaaacagggcaataatgttgttcctttcacactattgaattagccgtttaattacccaccatcttcttcctgattaacaagaaagaaattcacaagcttatattttgtgacctggttcaactaatcacagtaaataactgcaagttctctttttataaccccattaaaaatgaccgctcttaaaaatatttatcaaaacggtcatttttctattcctccaagcccggaatgaccgttttcggcacaaacaattaatacggtcatctgatttgtgttttttatgatttattttctgaaacgggcatgaaatttcgattattaaagtgatggtagtcacataaagtcaccttctagctaataagtgtgaccgccgtcatattacagagcgttttttatttgaaaatgaatccatgagttcatttcagacaggcaaatattcactgatatgaagcccgaactcgctggttttgcacttttgaaaacataaccgattacgtgcttaagcttctgaacctaagaggatgctatgggaaacacaagtatacaaacgcagagttaccgtgcggtagataaagatgcagggcaaagcagaagttacattattccattcgcgctgctgtgcagtctgttttttctttgggcggtagccaataaccttaacgacattttattacctcaattccagcaggcttttacgctgacaaatttccaggctggcctgatccaaagcgccttttactttggttatttcattatcccaatccctgctgggatattgatgaaaaaactcagttataaagcagggattattaccgggttatttttatatgccttgggtgctgcattattctggcccgccgcagaaataatgaactacaccttgtttttagttggcctatttattattgcagccggattaggttgtctggaaactgccgcaaacccttttgttacggtattagggccggaaagtagtggtcacttccgcttaaatcttgcgcaaacatttaacagctttggcgcaattatcgcggttgtctttgggcaaagtcttattttgtctaacgtgccacatcaaagccaagacattctcgataaaatgtctccagagcaattgagtgcgtataaacacagcctggtattaagcgtacagacaccttatatgatcatcgtggctatcgtgttactggtcgccctgctgatcatgctgacgaaattcccggcattgcagagtgataatcacagtgacgccaaacaaggaagcttctccgcaagcctttctcgcctggcgcgtattcgccactggcgctgggcggtattagcgcaattctgctatgtcggcgcacaaacggcctgctggagctatttgattcgctacgctgtagaagaaattccaggtatgactgcaggctttgccgctaactatttaaccggaaccatggtgtgcttctttattggtcgtttcaccggtacctggctcatcagtcgcttcgcaccacacaaagtcctggccgcctacgcattaatcgctatggcactgtgcctgatcagtgccttcgctggcggtcatgtgggcttaatagccctgactttatgcagcgcctttatgagcattcagtacccaacaatcttcagcctgggcattaagaatctcggccaggacaccaaatatggtagctccttcatcgttatgaccattattggcggcggtattgtcactccggtcatgggttttgtcagtgacgcggcgggcaacatccccactgctgaactgatccccgcactctgcttcgcggtcatctttatctttgcccgtttccgttctcaaacggcaactaactgaacatattttccgaataaagtgaggaatctgtaatgaaaaaaatcagcttaccgaaaattggtatccgcccggttattgacggtcgtcgcatgggtgttcgtgagagccttgaagaacaaacaatgaatatggcgaaagctacggccgcactgctgaccgagaaactgcgccatgcctgcggagctgccgtcgagtgtgtcatttccgatacctgtatcgcgggtatggctgaagccgctgcttgcgaagaaaaattcagcagtcagaatgtaggcctcaccattacggtaacgccttgctggtgctatggcagtgaaaccatcgacatggatccaacccgcccgaaggccatttggggctttaacggcactgaacgccccggcgctgtttacctggcagcggctctggcagctcacagccagaaaggcatcccagcattctccatttacggtcatgacgttcaggatgccgatgacacaagcattcctgccgatgttgaagaaaaactgctgcgctttgcccgcgccggtttggccgtcgccagcatgaaaggtaaaagctatctgagcctgggcggcgttagcatgggtatcgccggttccattgttgatcacaacttctttgaatcctggctgggaatgaaagtccaggcggtggatatgaccgaactgcgtcgccgtatcgatcagaagatttacgacgaagccgaattggaaatggcactggcctgggctgataaaaacttccgctatggcgaagatgaaaataacaaacagtatcaacgtaatgccgagcaaagccgcgcagttctgcgcgaaagtttactgatggcgatgtgtatccgcgacatgatgcaaggcaacagcaaactggccgatattggtcgcgtggaagaaagtcttggctacaacgccatcgctgcgggcttccaggggcaacgtcactggaccgatcaatatcccaatggtgacaccgccgaagcgatcctcaacagtagttttgactggaatggcgtgcgcgaaccctttgtcgtggcgaccgaaaacgacagtcttaacggcgtggcaatgctaatgggtcaccagctcaccggcaccgctcaggtatttgccgatgtgcgtacctactggagtccagaagcaattgagcgtgtaacggggcataaactggatggactggcagaacacggcatcatccatttgatcaactccggttctgctgcgctggacggttcctgtaaacaacgcgacagcgaaggtaacccgacgatgaagccacactgggaaatctctcagcaagaggctgacgcttgcctcgccgctaccgaatggtgcccggcgatccacgaatacttccgtggcggcggttactcttcccgcttccttaccgaaggcggcgtcccgttcaccatgactcgtgtcaacatcatcaaaggcctgggaccggtactgcaaatcgcggaaggctggagcgtggaattgccgaaggatgtgcatgacatcctcaacaaacgcaccaacagtacctggccaaccacctggtttgcaccgcgcctcaccggtaaagggccgtttacggatgtgtacagcgtaatggcgaactggggcgctaaccatggggttctgaccatcggccacgttggcgcagactttatcactctcgcctccatgctgcgtatcccggtatgtatgcacaacgttgaagagaccaaagtgtatcgtccttctgcctgggctgcgcacggcatggatattgaaggccaggattaccgcgcttgccagaactacggtccgttgtacaagcgttaatacattactccctgatgtgatgcccggtcgctccggctaccgggcctgaacaagcaagagtggttagccggataagcaatgttatccggctatattgcaggagcgattatgaaacaagaagttatcctggtactcgactgtggcgcgaccaatgtcagggccatcgcggttaatcggcagggcaaaattgttgcccgcgccagtacgcctaatgccagcgatatcgcgatggaaaacaacacctggcaccagtggtctttagacgccattttgcaacgctttgctgattgctgtcggcaaatcaatagtgaactgactgaatgccacatccgcggtatcgccgtcaccacctttggtgtggatggcgctctggtagataagcaaggcaatctgctctatccgattattagctggaaatgtccgcgaacagcagcggttatggacaatattgaacggttaatctccgcacagcggttgcaggctatttctggcgtcggagcctttagtttcaatacgttatataagttggtgtggttgaaagaaaatcatccacaactgctggaacgcgcgcacgcctggctctttattagcagcctgattaaccaccgtttaaccggcgaattcactactgatatcacgatggccggaaccagccagatgctggatatccagcaacgcgatttcagtccgcaaattttacaagccaccggtattccacgccgactcttccctcgtctggtggaagcgggtgaacagattggtacgctacagaacagcgccgcagcaatgctcggcttacccgttggcataccggtgatttccgcaggtcacgatacccagttcgccctttttggcgctggtgctgaacaaaatgaacccgtgctctcttccggtacatgggaaattttaatggttcgcagcgcccaggttgatactagcctgttaagtcagtacgccggttccacctgcgaactggatagccaggcagggttgtataacccaggtatgcaatggctggcatccggcgtgctggaatgggtgagaaaactgttctggacggctgaaacaccctggcaaatgttgattgaagaagctcgtctgatcgcgcctggcgcggatggcgtaaaaatgcagtgtgatttattgagctgtcagaacgctggctggcaaggagtgacgcttaataccacgcgggggcatttctatcgcgcggcgctggaagggttaactgcgcaattacagcgcaatctacagatgctggaaaaaatcgggcactttaaggcctctgaattattgttagtcggtggaggaagtcgcaacacattgtggaatcagattaaagccaatatgcttgatattccggtaaaagttctcgacgacgccgaaacgaccgtcgcaggagctgcgctgttcggttggtatggcgtaggggaatttaacagcccggaagaagcccgcgcacagattcattatcagtaccgttatttctacccgcaaactgaacctgaatttatagaggaagtgtgaaatgctgaaaacaattagcccgttaatttctcccgaactattgaaagtgctggcagagatgggacatggagatgaaattattttttccgatgctcactttcccgcccatagcatgggaccgcaggtgatccgcgctgatggcctgttggtgagcgacttgctccaggcgattatcccgttatttgaactggacagttatgcaccgccgctggtgatgatggcggcggtagaaggtgacactctcgatcctgaagtagaacgacgttaccgtaatgcgcttagtctacaagccccgtgtcctgacatcatccgcatcaatcgttttgcgttttatgaacgggcgcaaaaagcctttgcgatcgttatcacaggcgaacgagcgaagtacgggaatattcttttaaaaaaaggggtaacaccgtaatctcataccggtacgcccgcatgacgcgggcggttatcgaatgatggggtgaaaaatatgaaagcggcacgccagcaagcgatagtcgacctgctgctgaaccataccagcctgaccacggaagctctctctgaacagctaaaggtcagtaaagaaaccattcgtcgcgatctcaatgaattacagacgcagggtaaaattctgcgcaatcatggacgcgctaaatatatccaccgtcaaaatcaagacagtggcgatccctttcacatcaggctgaaaagccattatgcgcataaagcagatatcgcgcgcgaggcgctcgcgtggattgaagaagggatggtgatagccttagacgccagtagtacttgctggtatctggcacgccagttgcctgacatcaacattcaggtcttcaccaatagccatccgatttgccatgaactcggtaaacgcgaacgcattcaactgatcagttccggcggcacacttgagcgcaaatatggctgttacgtcaatcccagcctgatttcccaacttaaaagcctggaaatcgatctgtttattttttcttgtgaagggatcgatagcagcggcgcactgtgggactccaatgcgatcaacgctgattacaaaagcatgctattaaaacgtgccgcgcaaagcttgttattgattgataaaagtaaatttaatcgtagtggggaagcccgcatcgggcatctggatgaggtaacgcacattatttctgatgagcgccaggttgcaacttctttggtaacagcctgacggaaagggtagcaggccggagacgacgccccggccttgcctgttatcgctcgtcgcgacgaccacccaccgcagcccagatgcggcggacgtgcaccgtcacttcttcgcgatcgtgatacaactgccgcgcctgaatctgagcatttatgccatgttcatcaagctgtgcctgaatatacgccagattgtgactcacttcttcgtagcgttttttcatcggcagtttgaggttgaaaatggtttcacggcaccagccattaaccagccactgtgccatcaatgccgcaactttcgccggtttttcaaccatatcgcataccatccaggagatattgctgcgcgtcggacggaatttgaaaccgtcttcccgcagccacgtcacctgtccggtatccatcagactttgcgccatcgggccgttgtcgacggaataaacccacatgttgcgcttcaccagttggtaggtccagccgccagggcaagcgcctaaatccaccgcccacatcccgttcgccaggcgttcatcccactcatccgcaggaataaacacatgaaatgcctcttccagtttgagcgtggaacgactcggcgcatctgccggaaatttcaggcgcggaatgcccatatagaacgggctattattgttgctgtaactgtaaccggtatagcagcagcctggtgcaataaagaatacatgcacaaccggacgcttcggcgtttcatagttcgccagcaccccggcatcgcgcaaggcagcgcgtagcggaacagtaaatttacggcagaatttcagtaactctttgctttcgttggtatcggcaacttcaacacgcagttcaccgcccttctctactacgccctgtaacatgccgacaatgggggtaatacgatcttctggcggcaaatgctgcaggagttcccccaccacaaaccactggcgggcaaaaattaaactactgaacggcagctcacggattaacttatcgccatcatcaggttgataacattcataaatgacataacccgcattctctttcacgcgggcaaaaccgaaaatttcccgctggccggctttatcggtaatttctgcggcgcactctttttcaaagcccggacggcacagcaatacaaccttattcatgacttacgcccttgcgctttaaacggatagcaccaactaacattaacgcccagcccgcgaggaagctcacgccgccaaccggagtgacaaacgcccacaaacgcagatgggacagcgccaggcaataaaggctgccgctgaacaacaccgtgcctaacgcgaggaaaacgctactccagtaaaaccagatactgatgcgacgctgcattgccaccgccagacctaagatcgccagcgtatgaaacgcctggtattcgaggccggtctggatccagcccatctcaacggcccccatggttttacttaacacatgcgcgccaaaagcgcccagagccacaaaaatgaagccgctaatggcggcgaaaatcagcataaaacggctggtcatggtcgtaccctacgtaaattattgttcataacgaaagcggaatttttcttgttcagcagcggctttcgccaggatccattggcgaaaggcggctattttacccagttctgcctgactgtcatgacaaaccagataaaaagcatttttactgaccagaacatcattaaacgggcaaacaagacgtccggcctcgatttcagattgcgccatcacgttatttgccagcgccactccctgcccgtggatagccgcttgcagcaccatggcgctatggctaaaaattggcccttgctgaacgttgatatgatttaaccccaactgtcgggtatatgtctgccagtcacggcggctagcatcatgtaataacgtatgtttagccagatcttccggtgtcttcaagggtttttcgccagtcagcagtagcgggctacacaccggcaataaatattcggcgtacagtttttccacccgtagccccggccagttgccccgaccataaaatatcgccacatcaacatcatccgccagcttatcttcctgacgatcaaccgcctggattcgaacgtcaattcccggataagcactattaaagctggaaagtcgcggaaccaaccaatgaatggcgaaactggggagtaaactgaccgtcaacgcccccttggcgctacgggcctggagtttacgcgtcgcttcggttaattggctaaatatctctttgatatcgaggaaatagctttgcccttcctcggtcagcaggagactacgattacggcggcggaacagttttagccccaaaaaatcctcaagagacttgatttgatgacttactgcggcttgggtcacaaaaagctcttctgctgcgcgagtgaaacttaaatggcgtgctgcggcatcaaaaactcgtaaggcatttagcggtggtaatcgtttagacatggctattaaactttgatgttaaatgaatttaacaattagatcacactatgtaacctattagtttttttaatctgagccattataaattgtccgttgagcttctaccagcaaatacctatagtggcggcacttcctgagccggaacgaaaagttttatcggaatgcgtgttctggtgaacttttggcttacggttgtgatgttgtgttgttgtgtttgcaattggtctgcgattcagaccatggtagcaaagctaccttttttcacttcctgtacatttaccctgtctgtccatagtgattaatgtagcaccgcctaattgcggtgcttttttttaccttgcgatcgcgaattactgatccagttcgaccatctctttcacgtcagtacggttgatctgctgtttgttgccattagcgtctttatagctaatcataccggtatcgttatcagtctgtggtttgccgtcagagacgatggtacgtccgtcattggtgtgcatcacatagttgctaccggaacaggcgctcagggcaaaagtcagcatacaggcagaaataattgcggcagtctttttcatcatcttctccttaaagcgattaataaatcttaatagtattgattaacaggctaaaattaacgcctaacactattcagcatatgttacttacgcggcttcgccaggatatccagataattctgatggttagcactctccttgtatcaaagtgaattttgcgtcacgatcggtgcatcaagccgaggagtaccatgaacgtttttaatcccgcgcagtttcgcgcccagtttcccgcactacaggatgcgggcgtctatctcgacagcgccgcgaccgcgcttaaacctgaagccgtggttgaagccacccaacagttttacagtctgagcgccggaaacgtccatcgcagccagtttgccgaagcccaacgcctgaccgcgcgttatgaagctgcacgagagaaagtggcgcaattactgaatgcaccggatgataaaactatcgtctggacgcgcggcaccactgaatccatcaacatggtggcacaatgctatgcgcgtccgcgtctgcaaccgggcgatgagattattgtcagcgtggcagaacaccacgccaacctcgtcccctggctgatggtcgcccaacaaactggagccaaagtggtgaaattgccgcttaatgcgcagcgactgccggatgtcgatttgttgccagaactgattactccccgtagtcggattctggcgttgggtcagatgagcaacgttactggcggttgcccggatctggcgcgagcgattacctttgctcatagtgccgggatggtggtgatggttgatggtgctcagggggcagtgcatttccccgcggatgttcagcaactggatattgatttctatgcttttagtggtcacaaactgtatggcccgacaggtatcggcgtgctgtatggtaaaagtgaactgctggaggcgatgagcccctggctgggcggcggcaaaatggttcacgaagtgagttttgacggcttcacgactcaatctgcgccgtggaaactggaagctggaacgccaaatgtcgctggtgtcataggattaagcgcggcgctggaatggctggcagattacgatatcaaccaggccgaaagctggagccgtagcttagcaacgctggcggaagatgcgctggcgaaacgtcccggctttcgtagtttccgctgccaggattccagcctgctggcctttgattttgctggcgttcatcatagcgatatggtgacgctgctggcggagtacggtattgccctgcgggccgggcagcattgcgctcagccgctactggcagaattaggcgtaaccggcacactgcgcgcctcttttgcgccatataatacaaagagtgatgtggatgcgctggtgaatgccgttgaccgcgcgctggaattattggtggattaatgacaaacccgcaattcgccggacatccgttcggcacaaccgtaaccgcagaaacgttacgcaataccttcgcaccgttgacgcaatgggaagataaatatcgccagttgatcatgctggggaaacagcttccggcattgccagacgagttaaaagcgcaggctaaagagattgccggatgcgaaaaccgcgtctggctgggatatacagtggctgaaaacggcaaaatgcatttctttggcgacagcgaagggcgcattgtgcgcggcctgctggcggtgttgttgactgccgttgaggggaaaaccgccgccgagttgcaggcacagagtccactggcattgtttgatgagctgggattacgtgcgcagcttagcgccagtcgcagccaggggttaaatgcgttaagcgaggcgattatcgctgcgacgaagcaggtttaagcacagaaccgggtcggataagacgttcgcgtctcatccgacctgattgtttaaccctgacgcgccgctttcgccatcatcttcttcagcgcatgagaaaccgcaacaaacccaaaggtggcggtcaccatcgttgccgcgccaaatccagatgcacaatccatccgcttcggcccttctgccgtggctttcatcgcacacaccgtaccgtcactctgcgggtacaccagcgcttcagtagaaaacacgcaatccacgccgagcttacctttactgtttttcactacgccaaaatcgcttttcaggcgctcgcgcaacttcgccgccagcgggtcctgaatcgttttcgccagatcggtaacctgaatctgcgtcggatcaatctgcccacccgcgccaccggttgtgaccagtgggattttattgcgccgacaataagcaatcagcgccgctttgggccgtacactatcaatggcatcaatcacgtagctataacccacgctcatatactgcgctacgttatccggcgtcacgaaatcatccaccaccgttacacggcactccgggttaatctggcgaatacgctccgccataacttccgcttttgccagcccaacgttatcgcgcagggcatgaatttgccgattggtattggtgacgcacacatcatccatatcgataagcgtgattgcgccaatccccgtgcgcgccagcgcttccgccgcccaggaaccgacaccaccgataccaaccacacaaatatgcgcgtcagcaaacagttgcaacgctttttcaccatacagacgcgctgtgccaccaaaacgctgacgccatgcatcactaattaccacagacatagcacctcagaattaaaaagggcgaggttatccctcaccctaaacgcataaatgcctgatgcgctacgcttatcaggcctacataactcctgcaatattttggatttgcatgatttgtaggccggataaggcgttcacgccgcatccggcatgaacaacgcgcacttagtcaataatcaggatgtgaggttacccctcaccctgtcatatccgtaaaaacggcatacagaatatcacatcagccgctaaagacgttacctgcgcccggggcggttttcagcacccagacacgtccatagtggttgtaccaacctgcgcggtgtccggcttccggcccgatcccttgatagatatcgaagtgttggcctttgattgcaccaccgacatccagcgccaccatcagacgcagttcgtactgaccattaaatttgccgttattatccagcaacggcacttctgccagcaaggtagtacctggcggaataatggaacgatcagaggcaacactcgcgcgaccaaccagcggcaccgcacttgcccctttcaccggagcaaaagattgcggtttaaagaagacgaaagacgggttctgttccagcagctcgcgaacctcggcttcactgtgtgtttcgccccagtgacgaatcgcctgcatgctcatatcttcttttttcacttcgccacggtcgatcagcaccttaccaatgctgcgataggcatgaccgtttttccctgcatagctgaaaaagttaagcggactgccatcaccaaagtcgatatacccactaccctgcacatccataatgaagttatccatcagggagttactgtaagcgagaatatatttatcactcaatgcccccgcgtagatctccgcacgagacggcagacgaccacgttttggcggcatacggtaaataggatactggaactcgccctggcgggtatggcgcgcctgaattaccggcgtgtaataaccggtaaactgcacgttaccatagttgtcggcaccttccatctgccaggcatcaatgccgaactggcgcatattgcgggtatcaccgcctgcgcgcagccactcttgcaccgcgttataaacattactctggttgccatacagacgcggactgctattacggatatggttaatttgctcggcaaaatcaccggcgttaatcggcgcgccaacggcatctggctggttcaccagagagaaaggctgggtaaatttcccgtctttatattgctgtccgcgatcggttggtttggaagagcaggcggcaagcattgccacaaccgtgcccataagaaggtactttacccaacgtcctttcattgttctcttcttcaggttaaaaaataaggcgcaacgaagataacaaaccgccgcgtttaatgaaatgagcagcctctccctgacgcaaattttgcacaaaaaataggctttagtgatttgtttttgttcaaaatcatgccaaatccgtgatcggggtaaaaaaaaggttgcatgaaaacgcgagcggagtatagtgcgcatccacggacgcggggtggagcagcctggtagctcgtcgggctcataacccgaaggtcgtcggttcaaatccggcccccgcaaccaattaaaatttgatgaagtaaagcagtacggtgacgcggggtggagcagcctggtagctcgtcgggctcataacccgaaggtcgtcggttcaaatccggcccccgcaaccaatcaaatttgatgaagtaaaagcagtacggtgacgcggggtggagcagcctggtagctcgtcgggctcataacccgaaggtcgtcggttcaaatccggcccccgcaaccaattattgaacaccctaacgggtgtttttttgtttctggtctcccataaaaaagcgccattcagcgcctttttatcatccccttctcgccagcgtcgccccatcggcaaaatacgctttaatccccgcaagaatagactccgcaacttcctgctggaaagtcgccgttttcagtttacgctcttcctcaacgttactgataaacgccgtttcgaccagaatggagggaatatctggtgcctttagtacggcaaacccggcctgttcaacttgatttttatgcagcttgttgattttaccgagcttattcagtaccgctttaccaaacttcaggctgtcggcaatggtcaggctctgtaccatatcgaacatggtgtggtcgacatagcggtcaccgcttttgctcacgccaccaatcaagtcgctggcgttctgggtttgtgccagatattttgccgcagtactggttgcacctttggtactgagcgcaaacacagaggaaccgctcggctgacgactggtaaaggcgtcggcatggatagagacaaacaggtcagcacgctgtttctgggcttttgctacgcgcacttgcaatggaatgaagatgtcttcattgcgcgtcatgtacaccttcatattgccctctttctcgatcagagagcgcaaacggcgagctatttgcaataccacatctttttcgcgcgttttgtatttccccaccgcaccggagtcttcgccaccgtggccagggtcaagcataatgacaatcggacgatcgcgccctgctttacccggttgtggaccactttgcgctggcggcacctgcttttcgaggtcgcctttgttgtaatcctccagcagcgccagcagcgggtcctgcatatcctgtgcattggccggatagaggtccatcaccagacgctctttaaacccggcgaccggcgcaagggcaaacagctgcggttttacgttttgctttaattcaaaaaccatccgtacggtttgcgggtcaaattgcccgacgcgcgcgctcttgatgaacgggtcgtctgcacgaatttgtgccgccatccccttgagtacgctgttcaggtttacatcttcgatatccaccaccacgcgttcagggttactcaacgcgaactgcttatatttcagctgacgattactttccaccgtcacgcgggtgtagctggacgcaggccagacgcgcaccgccacgacctggctgaccgcagccagactgacctgacttacgctcaatagccacatggcacccgcgccttgcagtaaacgacgacggctgattgcagtgttggatccactcatgcctctcccgagcaaaagaaatctaagctgtgtaacaagtaaacgactaatttgaccggaaactttagcgaaagacgcataatctgtcatctaataaacggtaaacattctttttatattcacggcattactgataaaaaagtcgctctcgcataaaatttacacttgcaccctgcgaaaaaacagaataaaaatacactaatttcgaataatcatgcaaagaggtgtgccgtggtaaaggaacgtaaaaccgagttggtcgagggattccgccatagcgttccctatatcaatacccaccggggaaaaacgtttgtcatcatgctcggcggtgaagccattgagcatgagaatttctccagtatcgttaatgatatcgggttgttgcacagcctcggcatccgtctggtggtggtctatggcgcacgtccgcagatcgacgcaaatctggctgcgcatcaccacgaaccgctgtatcacaagaatatacgtgtgaccgacgccaaaacactggaactggtgaagcaggctgcgggaacattgcaactggatattactgctcgcctgagcatgagtctcaataacacgccgctgcagggcgcgcatatcaacgtcgtcagtggcaattttattattgcccagccgctgggcgtcgatgacggcgtggattactgccatagcgggcgtatccggcggattgatgaagacgcgatccatcgtcaactggacagcggtgcaatagtgctaatggggccggtcgctgttagtgtcactggcgagagctttaacctgaccagcgaagagattgccactcaactggccatcaaactgaaagctgaaaagatgattggtttttgctcttcccagggcgtcactaatgacgacggtgatattgtctccgaacttttccctaacgaagcgcaagcgcgggtagaagcccaggaagagaaaggcgattacaactccggtacggtgcgctttttgcgtggcgcagtgaaagcctgccgcagcggcgtgcgtcgctgtcatttaatcagttatcaggaagatggcgcgctgttgcaagagttgttcagtcgcgacggtatcggtacgcagattgtgatggaaagcgccgagcagattcgtcgcgcaacaatcaacgatattggcggtattctggagttgattcgcccactggagcagcaaggtattctggtacgccgttctcgcgagcagctggagatggaaatcgacaaattcaccattattcagcgcgataacacgactattgcctgcgccgcgctctatccgttcccggaagagaagattggggaaatggcctgtgtggcagttcacccggattaccgcagtagtagtaggggtgaagttctgctggaacgcattgccgctcaggcgaagcagagcggcttaagcaaattgtttgtgctgaccacgcgcagtattcactggttccaggaacgtggatttaccccagtggatattgatttactgcccgagagcaaaaagcagttgtacaactaccagcgtaaatccaaagtgttgatggcggatttagggtaagcgatgaaaatcgtcggatgcgacatgcgtaacactcgtacgtcgcatccggcaattacgtttattcccgactactaaacaacgccgccagaccactgcgccgctcagtacgagtggcgattgccgcacttaatatgcgctcatcggcatacaggctcagacggcgacgcgcgcgggtcaccgcggtataaaccagctctcgcgttactaccggcgtgcgttggctcggcaaaatcaacgccgcatggtcgaactcgcttccctggcttttatgtaccgtcatcgcccacgtagtttcgtgctctggcaagcgactcggttgcacagacttaatattgccgtccggcatcgcaaaccagacgcgcgtcccctgcccgcgatccagcgcaataccgatatcgccattaaacaacccaagcgcgctgtcattacgggcaatcatcaccggtcgaccttcgtaccaacgagagtgcggatgacgatgaattttgcgcttctgttgcataaactgctcaattcgctcattcagtccagccacgccaaacggcccttcccgcagggcgcacaaaagctggtactcattgaacgcctgaatgattaaatccggctcggcacgcgcttgcagcagatccagataacgtccgtaacccgcaagagcttcctcaagcatcgcaatataatcttcgccgctctgtaaaagccgtttttcgatatcagtaaaatcctgctgaaaaacggttttcactgccgttttatcaccacggttgatcgccgcagctaactgaccaatgccagaatcgctgccgaaacgatagcttttttgcagcaggcagagactgtcgcgcaaagatgccgcttctgtgccggttcctgccggaacgtgagtccccgtcaggcggcttagctgcctggcacgctcggcggtaaagcccgcgttggcataagcgcagatatcgcccagcacagccccagcctcaacgctggccagttgatcacgatcgccgagaaagatcactcgcgcatgatcgggcaaggcgtcgatcagtctgctcatcataggcagatcgatcatactcgcttcatctaccaccagcacatcaagatgcagcgggttaccggcatgatgacgtaaacgctggctacccggctgcgcgcccagcaatcggtgcaaagtgctggcatcttccggaatgcgtttcttttgttcatcggtcagcggtaactgtcgcaaagccttgccgagagattcggttaagcgcgcggcagctttacccgttggtgcagccagacggatacggcagcgttcgccgtcggccatttgaattaacgctgccagcaacttcgctacggtggtcgttttaccggtgccagggccgccggaaatcacgctgatccgccgcgtcagcgccactgccgccgcaactttttgccagttaatttcatcgcttactggaaaaagtttgtccagggtttgcgccagtagagcttcatcaacctcaatggcatgattcacttcgttgaaaaagcgtgccactgtgcgctcgttacaccacatgcgattcaaataaagacgatcgccacagaggatcatcggcgtgggttcatctcccctgctgaccgcttgagaagccagcaagcattcttcccaattttgtagctcaccgatttcactgacacaggtcgccaacagcggatggctcgcctcgttattttccagtcgactaagcggcaaacaaacgtgtccctctccggcatcatgacttaacagtgccgccgcgagggtgacggcaggatgttcatctcccgccacggtcagggcaaattgcacatccagcgggcgtagctgtttgtgctccacagcttccagtaattgcttttgcaatttcattacgcctcctccagggtcataccggcaaacatctcatccatcagggcaatcaacccggcgttgggtcgggttgtgtaaatcccctgttgcggatgttctttatcaacgccacgcaggaacagataaataacgccgccaaagtggtgctcatagtcgtaatcagcaatgcgatggcgcagataacgatgcagcgccagggtataaagctgatattgcagatcatagcggtgtgcctgcattgccgctgccatagcctgttgggtgtaagcgctactgtcttcacccaaccagttggatttatagtcgagcaggtaataacgcccttcgtggcggaacaccaggtcgataaagccttttaacatgccacgtacctgcatgaactccagcggcgggcagcctgcggatagcgggtcaaactggcggattaacgtatcaagctgactggcgataagcggttcactaatcggcagataaaactccatctccacctgtttattgcgggcggaaagttgactcaggcttacgccggtttcattgagaggtgcctggaggacagccgtgatccactcggtcaataccggttcccactggctttcaaagccgccgagttccagtttttcccgcacccagttcgggtcaaccggctgggtaaaatccaggtcttcaaacaaactgtgcaagaacgtccccggactcgcaccgcgcggaaactgatgtggtgttaacgtcggttcttcaacgacgctggcaacgcctgcagcatcgacatccagccgaggcatcaaatcctgggcgataccgtgaccacgctgttgcaaaccagagtagctggtgacgcgccagttatcgccgggcaatcgttgtaacgtcttcgcattcagctctgctgtagaaacatcattaacctgccagggttggttatcaccagtttgtgccgtttgccaggcaatatcatcatcgcataacgcttcaatacaggtgcgaagccctgccgcatcttgcggttcccctttttgcagcaaacgcccgagcgcactttggtggacgtcggtgtcaccttttttatcgccacgacggcgcaccagcggtgcaacgccgagactgcaatgccaaacgctacgtgtcagcgccacgtaaagcaaacgcagatcttccgccagacgttcggcctccgcgaggtcgacgctttctggcgcagcattaagatccagaactgcctcaaagctgtggcgatcgtgataaaacgcctgctcctggacgcggaaattggtgataaacggcagccagaccaatggatattccagccctttgcttttgtggatcgtgacaatctgcaccagatgtttatcactttcgagacgcatttgttggctggaggcattactgtctggctcgaggatatgttggcttaaccagcgtaccagcgcatgttcactttccagctgcgttccggcttcttgtagcagttcgctgatatgcaagatatcggtaagacgccgctcaccgcctgccgttgccagcaagttttcagcaatgttacgcgcgctcatcagcgcccgcagcatcggcataacgccacgtttgcgccagatttgccgataaccatcgaactcttcgactaccacatcccacgcatgttcgtcattgttcagcgtttcgatatccagcgcgttcagccccatcatactcgttgccagcgcactacgcagggtgttctcacgttcgggcgtcatcaccgcctgcaacaaccaaagcatttcctgcgcttccagagtttcaaaaacactgtcgcggttgctaaggtaaacggaagggatttccagcaacgttaaggcatcgcgcacctgggcggcctcctggcggctgcgcaccagcacactgatgtcgctagcacgcaccggacgcgcgtcgtcgccgttcatcagcaacgcttcgccccgctgtccggcttgtagccagtcgcggatttgcgcagcacatacctgcgccatggtactttgataatcgccaacgccgcagctttcgccttccatcagccacattttcatcgcaggctgtgtttcacctttaaatacaaaacgtaacgcctgatttttcccggcacttttcactggaataaacggtatttcgcgaaacatgaacgcgtcatcagtctggctgaaaagcttattcacgctgttcaccattcctggtgcggaacgccagttggtgtctaaagtgtagtgggcgtgaacttcgctacgcgccttcatataagtgaagatatccgcaccccggaatgcatatatggcctgcttcgggtcgccaattagcaacaatgcggtttccggctgatggtgccagatacggcgaaaaattcggtactgctgggggtcggtatcctgaaattcatcgatcattgccaccgggaatcgcgtacggatcgccgctgccaacacctcaccgctttcgctacgcagcgcggaatcgagccgacttaacatgtcatcaaaacccaattcgccacggcggcgtttttcacgcgctactgtttcgcggatctcagccaatgcgcgggtgatcaccagatcgcggatgctcaatggttctgcaagcagttgatcgatcgcctcaaacagtggatgtcgcggggtttcccccccggccttcgtgcgatcttctaagaaacgctgggagaatttttccaggctctccggcaactgataactgtttgtctcttcttctgcccaggcgctgatcttgtcgatccatttagcctgattgctacggttaaacttgcgtcgatcaataccagaagattcgatcagcgcatccagttcacccactgcgtcgcgccactgctgttttaccgtatcaatacgcgccacaatttgcgcgtgacgggaagccagcgtttcatcatcgggcggcggtgctttgataaccggcgcttcgccttgcagataacgattaatatcgcgcagcaacgcctgcggccctttccaggtttcaaagacgacctgggctatttcacgcggcagcgggtagcagtggcgacgccagaaatcggcgcaggcctggtagcgtagcagagactcatcttcaatcagctgctgctcaaacagcatgccggattcaaaggcattcaggttgagcatgcgctggcaaaagccgtgaatagtaaagactgccgcttcatccatctgccgttcggctaacaacaaccactgcgcggcttgcgctttatcgtcgatctcttccagcaggcgttcgtacagtggattgtcggtggtttcacgcagacaggcgatgcgcaactcgtggatattgctacggatacgaccgcgcaattctgccgtggcagcctcggtaaaggtgaccaccagcagttcttcaacggtcagcgggcggggaaaggcggcggaaccgcctagtccaagtaacaggcgcaaatagagcgccgcaatcgtaaaggttttgcctgtgccggcagaggcttcaatcaggcgctcaccctgtaagggcaagcgcaaaggatctagtgtctcggcgacatcactcattcttttcactcatcaggggcattgtttgctgcaacgcgctgacgttctcccacactttccagccttcagggtgtacatattcggctttcccgttctggctgccggaaatctggctcagaatagccatgccttgcggctcgaccaccgcctgatggaagaaatcagcaagtttttgcggcgtcagcagttttatctgggccacgattttatcacggctatcgaagcgcatattgccgcgatcgaaatctttacttaacttgcttgcttcttcgccgagcgtttgcggtgcctgcagcatctgggtaattaccgcctgctggatttgcgcaaactcatctggcttcatcgctcgcaattttgcctctgcggttgggaaaaacgccttgtaacgctcccacaagaaactaggctgtttatcattgctttgcaaaaggaagcccatgccccactgacgccccacgctcattggaaacgcaaacacggcatagcccaattgttcttcggtacgcaactgattgtagaaccacggctgtacgatctgccccaacagagagctataggcactgctggtgtattcatcgtagccagtcggtacaaataccgctgccagtgcggagtcggtgctgttaccggctttttcaaagatgacggattgttttttatcgaccactacatctttgtttcgacaccactcactaccatcagcgcccaactgtttttgcacatcgcgtgccagcgttgttgcctgggcctcggtcatgttgccgataaccataaactctggtcgagccccactttttaaggcgtcgcgataggccagcacctctttcaacgtaatggagggcaaaattttacgccgttcatctcggctgaagtacggcacttggctgagcatctgcgcgggcataatcgcctgctcaaacgctttacccttttctgcggaatccatcatctggttataccaggacttcgcctgctcaagctgatcttccgtagcggtatagctaaagtacccctcgagcaatgcctggaacagctgcggcagacgctgggtgtaaccattagcattaaccataaggccgttgttagcgttggtggaaaaacttatgccaccaacgctcgcctggttgcttaactgatcaagcgccagccctgcgagataatcattgagcgcaaacatcacctgattgcgggcgctgtccatggctttcggattacgcaaaatcaggctgacatcagctttgggctcgctggcaaaataacggcttggcgcatacaccacgcgcagattgctctcatcaacaatcagctctggatggtcgtatttcttctcactcttaatcaggctgaaatcatcaggaatataagggttaagctctggcaaagagagcgcaatgtcggcggcttttttctgccagtcggcgaaagtttgtgcgctgattttatcgacctgatacggcgcatcgacaaagtaagccgttttgttgtgcggctctttcgggctgatataccagatacgcgcattctgcggcgtcatcatcgccagacgttcctttactgctttagcatcgtaccgatcggcaatattgactgcatccagcgtatgctcaacaggaacgcgaatcatggtatctgccagccattcgacgtaatccatatcacgggtgatgctcggataacggaagtcgatatccagcacattcgccagttcatcgaagtattgtttatcaatgcctttttcacgtaacagattgagatagctaaaaattgccgccacaacctgatcgcgattagccaggcctttatcggttaaagacgcagagatcgctaatacgccgctgttgccgttgacgataggatcggagttggcgctaatgccctcaactaatccctgcttttgcagccagtcagaaagtgtacctgggctgcgattgccaatcagataggtaatcaattcatcggttttactacggaacttcgcactgttgttatcgatgcgaaactcaacgcgcaacactttacgcggcagcgcagggacgtaatgaatgataatgcccttttgcgcgtcggtgactaccggcacggtgatttccggttttttgctctctttgttcggcacgcgaccaaaggtgtccgccgccatttttgccaactccggcagcggtttattactgtaaataaccgccttcatcaaattggcggaatagtacttctcgtggaaatctttcagcgcctgctgcaccggattaccaggtttgtcgcttaaagtttcgaggttaccaccagaaaacttactaccggggtgtgccgggttaatggtttctgcgctgacctgtgccatgcgcatcccgtcacgcgtacgcgccatggttaattcagcgttcaccgcattacgctcacgttcggcatatttcttgtcgagcaaaggttcagcaatagcatcggccaggcggtctaccgcaccaggcaaggcgtcgttctcaacttccagatagaaagccgtgcgatacggcgcagtgctggcattgtgactaccgccgtgcattttgagatattcggccagactgtcagcctgcgggtactttttgctccccatcagactcatatgttcaaggtaatgtgccagcccctggtacgcctcgggatcttccaggctcccaacgggcaccaccagcgcgctgaggcttttaactgcctgcggatcagaaaccagcaagaccaccataccgttatccagacgtatagcctgatactggcggttatctttatcacttttacggatggtttcctgaatcggctgccatcccgtttctgcctgacttaagggtgcccaaagggcaactaacaacaataatgctttgaaccaggtgctgcggggcattcacggacctcataatcaacttaattttctgtccagattcaacacgttaacgcaaatcatctgccagaatttaatcttgtgctgcacgagtcagcctatgtttatataaccatcagtccgtgactggtgcgcatcataaagtaagcggatagattgcgcaatttttatacagcactcaactctgattaaagcgaaacagcggtaacaggaaacgttggctctgttcaacgatggcctccattgtctctggtgttaattgccgccagagcctttgataccagatatcatcaccttcgccacgcaccatcatgttgccttcgtaagcctgaaggaatttcgtacgggctttttgcaacgtggaatcgtcatccagcatggcatcgttttgcgcgtcataacaggtttttagccacgcgccgccactttcaggtaacaccagcaatggcgcggacattccttcacgatacccctcaatcagttgactgaggtaatgcaaagcctgttcggctgcaagcggcggaaaacgccactcgccgtctttgcgtagaaaaaggcgactttcaccattaccaccgctggcacagtagacaaggtgttccagccaaagttgcattccctgggccacacttaataaagagggacgccagcgcaacaggccatccggctgcacctgcggcaaccagccagttatctgcacaccgttgcaggcgagatcaatttccatactctgccccggctggcgacaggcaatgactctgtcggcaagctgctgcatctcctggcactgtgtttcccagaaaatttcaccaaaagcgccatacggtaaatcccctgccgctcggaagcggcggaacaagcgttcggcatcatcctgctcaaccagtgcattcaataactgctgattgatttgataacggctaagtccttccagaataaatggctcggtgtcggggatttcgctgtcttcagtacggaagttcacctgcaaacgcatctggaaaaatgcccgcaccggatgtgcccagaatcgttgtagcgtttccagcggcacggtttccggtaaggtaaacggcagcggctgaacaaattcagaatgtgctttaccagcctggctggccgcaggtagccattcacgagcatagctttgtcgttcgcctggctggtagttttgtggatcaaacggcatccgggtatggaggcaagtaagatgcgcttttacccttgcctcgctttcatcacagttgagcgcttcatcgcccggtagataatgactttgcccgatgtagtcgatcagttcctgcaccagtacgctcgggaaacgctcactgttatcctgaatggaacgaccgatatagctgatatagagtttttgctgcgcggaaattaacgcttccaggaacagatagcggtcgtcatcgcgacggctacggtcgccacgcttcggtttctggctcatcaggtcaaagcccaatggcgcaagctgacgtggataaacgccgtcgttcattcccagcaggcaaaccactttgaacggaatactacgcattggcatcagagtacaaatgttaaccggtccggcgagaaaacgctggctgatacgttcttgatccagacgctgtgccagttcatcacgcaatagactcagcggcaccgcgtcgccatactgcgcacctaaaccttcggcgataatcgcctgccattgttgttcgatcagcgtcatcgccgcttcggtttccgcatccggcaggaagaaggcgttgagcatatcgcgacaaaccggcaaccactcttccagcggacgctcctgtgccagcccgcgacgccagatgtttagctgcattagcagactagccagatgccccaccagttctgcaattaagccgctgctttcatcataaggtagaacgctttgccactcgccctgcgcgctctccatcgcgtagcccaacaacatacgcgtcaggccaaatcgccaggtgtgttgtccggtggcggggagttccagctcgcgaacgttgtcgtcatctatgccccaacgaatgccggattcgttgacccactggcgtaaataacgcagcccttcttcggtgatgtcaaaccgcgccgccagcaccggcacatccagcaacgccagcacatcctcactcacaaaacgactgtcaggcagacttaacaggctgataaacgcttccagtaccggatgactctgccgcgcacgacggtcggaaatggcgtaaggtaggtaacgatccgcaggtgcgctaccaaacacagcctgaataaacggactgtagctgtcgatatcagccaccatcacgatgatgtcgcgcggagtaagtgtcgggtcttcctccagcatcgccagcaggcgatcgtgtaaaacttcaacttcacgctgcgggctatggcaaacgtggaaggtgatactgctatccagtggatcaagcgggcgtttgttatcgctacgggaaaactcttcgatgttcacaccagcaacggcgcggttttccagttccagaatgtcagactgaatgttatgcagcaggttatctggcgtgacatcgacaaaggcgtccagctcctggctgctctccaggtcagaaaggagataaatgtagtcgcgcccaagcttaccccaactagccagcagcgggttgccgacatcctgttcaccatcgctgttaaagagctgcccggcattttcgctatcacgaaatagcggcaattcgcgatcttcaaaactgtgtcgacgctgacgggtcagcagtttcgccagataagcaggatctttaatatcgccccagtaataacggcaggggttggtaaacaggagatggatttcaatatgtttacccagcgcctgtagcgcctggagataaacaggcggtaacgcggaaataccgcatataaagacgcggctaggtaaccccggcgggcaggtcgtcgcggactccagcgtttcgataaagcgctgatagagattggcgcggtgccagcgcggttgcccgagttgatgggtatattccaccagcgccttccacaacggggcttgccaggcctgtgcttctcccagcccttcaaccaaatgtcctgtttcccactgtgccagccagtccggacgatagaccagatactggtcaaacaggtccgccgctttactggaaagctggaacagttttcgcttgtcgctatcgtcagtcagataatgccgcaacagggtaaagtcttcgcgctccagcaattgcggcagcagagtcatcagtttccagctcatgctctgtttgttaaaggcgctctctttggggatttccggtaacacccggacgaacatatcccagataaagctcgctggcagcggaaaatcaatgtttgccgcaataccaaacttttggctcagggtcatttgcagccactgtgccataccggtactttgcaccagaatcatctctggttcgaaaggatcgtccagccgttcgcgttcgacaataaactccatcaacgcttccagcacgtccagacgattggaatggtagacccttaacatagcggctcctgattactgacgattcgggcaatgcaggcgggtcatctcgccttctctgcccccgggactaactagcgtaacgctgatgctgacacatcccgcctggcttgtctgcattcggttgacctgccagttggcaggtgggctaatcgcgcgcagttgcgtttgctgccagccatgccgccagagctgttggtactggtttctgctggcaagactgttcattaatgttcgctggaaaccgcttaacgcagtgacaatcatcaccatcaacaccatcgccaacattacctccggcaggctaaagccttgttgattcttcagggaagcactcataacgccctctctttcagcggttaaatcagggaagctgacataacgccctctctttcagcggacaaaaatcgctccagccgcgtgggctaaaaacaatgtttccatcaatgacttcgcctgttcgccacaagctaacgccttcataaccggcaatcaataaggcttcattatctgccagtaaacgcaaacaaacctgggcatcggtttcagcgtactggctgcactgaactgctggctgcgtctgccagcagtgcatttttccccacgccagcgcgctctgaacgatggcctggcggcgcaaactctgactttccatgctcacgcgagaggcaaaactgcgatcctgttggctcattccttgtaatagcaaactacccaaaaccagcagcatcaggaccagagccagactgctaacacccttttcgcggttcacaggttgaatcctgtcacgctatagctggcattcaccacggtttgcggttcagacttactggcagcacgcatattaaccgtcaacaccgggctgaagccgctgacatcctgacgtacgacctgaaaagtgtcgataatgatggcatccggattagtgactttatcccagcccttaccttcacaggatgtcgcaccgcgtagcgtttccagcacatgctccttcagacgaaatccaatctggtcggactcttttaccggttcgcgatcccagataccgttactgttcgcatcccactgcacaatgacacagtcaccctgtccgacaatttccagcccttcgccggtacagatgccatgacaataacccgccctctggagatgcttcgcgacggtaaatacccgcagccagatttcatcttccagcgccagcttacgggtgctcgttaaactttcacgctgtaacgcaggcagaaagcgtgccgcccccagcaacaatacgctactgatcgccatagcaatcaacacttccagcagagaaaaaccttgctcttttacaggcatccttctgtttctccttgctgacaaagccggagtcttccccacgggctaaccaccagccaccactcgcccgtactgtttttgaagcgaatatgcccggcccatgcggtattgcgcaggccaaagaaagcaaggctaggtgtcaggtcgctcatttcgacttcgggccagcgtggcacaaagaccaatggactactgccatgacaggtattggccccagcagcggaactcacaaggcaccataacgtcccctccctgataacgctgatactgtggtcgcggttatgccagttggcatcttcacgtaaatagagcaaatagtcccgcgcctggctggcggtttgccatagccgttggctctgctgccagtattgccagccatagagtccacttgcgcttagcatgaccaaaatcagcatcgcgaccagcgtttcaatcagcgtataaccacgttgtgttttcatgccggcagtatggagcgaggagaaaaaaagacgagggccagtttctatttcttcggcgcatcttccggactatttacgccgttgcaggacgttgcaaaatttcgggaaggcgtctcgaagaatttaacggagggtaaaaaaaccgacgcacactggcgtcggctctggcaggatgtttcgtaattagatagccaccggcgctttaatgcccggatgcggatcgtagccttcaatctcaaagtcttcgaaacggtagtcgaagatggattcgggtttacgtttgataatcaacttcggcagcggacgcggttcgcggcttaattgcagatgagtttgatccatatggttgctgtacagatgcgtgtcgccaccggtccagacaaaatcacccacttccagatcgcactgctgcgccatcatatgcaccaataacgcgtagctggcaatgttgaacggcaggccgaggaagacgtcacaggagcgctgataaagctggcaagagagtttgccgtctgccacatagaactggaagaatgcatggcacggtgccagcgccattttatccagttcgcctacgttccacgcactaacaataatgcggcggctatccgggtcgtttttcagctggttcagtaccgtagtgatctggtcaatatgacgaccatctggcgttggccaggcgcgccactgtttaccatacactggcccgaggtcgccgttttcatcggcccattcgtcccagatggtgacattgttttcgtgtagataagcaatgttagtgtcgccctgcagaaaccacagcagttcatggatgatggaacgcaggtggcaacgtttagttgtcaccagcgggaatccatcttgcaggttaaaacgcatctgatgaccaaaaatggaaagcgttccggttccggtacggtcgtttttctgtgtgccttcgtcgagcactttttgcatcagttctaaatactgtttcatggttcctcaggaaacgtgttgctgtgggctgcgacgatatgcccagaccatcatgatcacacccgcgacaatcatcgggatggaaagaatttgccccatgctgatgtactgcacccaggcaccggtaaactgcgcgtcgggctggcggaaaaactcaacaatgatgcgaaacgcgccgtaaccaatcaggaacaaaccactgacagctcccattgggcgtggtttacgaatatacaggttgaggataataaacagcaccacaccttccagcagcagctcgtaaagctgacttgggtggcgcggcagcacaccgtaagtgtcgaaaatggattgccactgcgggttggtttgcagcagcaaaatatcttctgtacgggagccagggaacagcatggcaaacgggaagttcgggtcaacgcggccccacaattcaccgttaataaagttgcccagacgcccggcaccaagaccaaacggaatgagtggtgcgataaaatcagagacctggaagaaggaacgtttagtacggcgggcgaagataatcatcaccacgataacgccaatcaggccgccgtggaaagacatgccgccgtcccagacacggaacagatacagcggatcggccataaactgcgggaaattgtagaacagaacataaccaatacgtcccccgaggaagacgccgaggaagcccgcatagagtaagttttcaacttcatttttggtccagccgctgcccggacgattcgcccgtcgtgttgccagccacattgcaaaaatgaaacccaccagatacatcaggccgtaccagtgaagcgccacgggtcctatactgaaaatgaccggatcaaactccggaaaatgcagatagctactggtcatctgtcaccacaagttcttgttatttcgctgaaagagaacagcgattgaaatgcgcgccgcaggtttcaggcgctccaaaggtgcgaataatagcacaaggggacctggctggttgccggataccgttaaaagatatgtatatgatccgcgttataaccctccgcgaatcagcccgcccatgccgcgacgctccataaaggctgcaacctgatggcgaacttcggtcgccagttgcgcttccagactacgctgcgcaagattttctgcttcggcataatcaatgcgccgcagcaggtattttgcccgcgctacagaacgtccgttcatagacagatggcgatacccaagcccaatgaggattgccacgcacatgggatcgcccgccatttcaccgcacaaacggagatcgattccatgtatttccgcttcccgggcgatcatcgccagagctcgtaacattgcaggatgaagactgtcataaatgttcgccacccgggtattgttgcgatcaacggccagaatgtattgagtcagatcgttggtgccaacagagatgaaatcgacccgctttgccagatgcggcagcataaataccatactcggcacttccagcatgatgccgatacgtggtttgggaatttcgtaaccgatcatctcctcgacttcacgtccggcacgttcaatcaggcggcgtgcttcatcaacttcatcgaggcttgtgaccatcggcaacagaatattcaggttgcccgtagcggcattagcacgcagcatcgcccgcacctggatcaagaagatctccggctgatcgagcgtaatgcgaatcccacgccaacccaggcatggattctcttcgctgatcggcatgtaaggcagctgcttatctgctccgacatccagcgtacgcaaggtgacgggtttatcattgaacatttgcagcatcccctgatactgcgccacctgttcttcttcgctcgggaaaccactttgcagcatgaatgggatttcagtgcgataaagaccgatgccatcaatacggctgcccagtttttcttcatgttccgggcttaaaccagcattgagcatgacttttatacgctcaccgctttttaactgcgcgggtaaattgacgtcatcttccgccagacggctaagctcaatctcttcactaattagccgctgatattcttgcagcagtaccggctccggatcgaccagcaattcaccgcgatagccatcaacgatcagcgtcctacgatgcagcacgctaggctgaatatccgcgcccatcacggtagggatccccagcgcacgtaccatgatcgcagcatgggagttggctgcgccatctcgcacgacaacaccgactaagcgatcctggggcagctcagcaagcgttgtcgcactcagttcatctgccaccagaatgaaacgttccggccaggcgttcggcccttgattagcgtcatcaagatgaaacagcaatcgctgacccagcgcacgtaaatcgccagcccgctctttgagatagttatcacttagcgcggcaaactgttcggcaaatttttcaatgaccgtttttaccgcccactctgccacgctgcctttatcaacctcggcaaacaattcgcgacgcagccgggtgtcgctaagcaggtggctgtaaagatcgaaaatagccgccgtttctttttgtgcaccggcggcaaagcgtttgctgtagcggcgaaactcgtttgccgcttcttccagcgccccggtcagtcgttcgcgttccagagccggatccagcgtacttgcctgatacacctgttccattaaaggtaacgtggcatcctgccagccttcggcaatcgccacaccaggtgctgccggtaatgcgcggattcgcgtctggcgatattgcccaaacaaggcagtcaactggctctgagaaagaatagctgccatctgggtggcaagcgtcaccaggaaggattcttcactttcgtcatactggcgcaactctcgttgctgtaccaccagtacaccaagcaactggcgacgttgaataattggtacgcctaaaaacgcgcggaaacgttcttcttttacggaggggatgtatttgaagctggggtgcttttgcgcatctgcaaggtttatcggttccgccagcctgccaaccaggccgacgatcccttcatcaaacgcgagcgttacagtgcgaccgcgtggttttttcagcccccgggtcgccatcaggtagtaacaacgtcgatcatgatcggccaggtagacgctacagacctcggtatccatcgcaagacagatgtcggtaaccagaatatttaacgcctcattcaggcgtggtgcgctggctaccttttcgactatttcgcgcaggcgagtgagcataattggcgtgacttaacctcttttacgtcgataagcagatgcgttttgtggttttggcgtattttcctgcagactcatcaccacactcgcgaactctttcattaccctacggtagacatcacgtttaaaactcaccacctgtctgaccggataccagtaacttacccatcgccagccgtcaaactctggtgtactgctggtttgcatattgatttctgcatcgccgctcaccagctgcaagagaaaccatttttgtttttggccgatacaaaccggcttcgtgtcccaacgcaccaaacgtttcggtaatttgtagcgcaaccagttacgcgtactagcaaggattcgaacgtctttgcggcttaatcctacttcttcaaacaattcacggtacatcgcctgctctgcggattctccggggttgattccgccttgcggaaattgccaggagtgctgaccaaatcgccgggcccacattacctgcccctggcgattacaaatcacgatacctacgtttgggcggtagccatcgtcatcaatcaccggactacctcaaaataaagctttatatacgaatgattgtttcatactccaggaagacggtaaaccactctctgcagggcattacacactaataacaattgaataactcacagttatgtgcagagttataaacagaggaaggggtggatagccgtttttattcaccttttctgtggatagagttgtgaagaactacggaattactacgggaaaacccggagcattctgaataagcccgatatagacattttaaaatattcattatcagtcaatgcattacatgtaattttagtaatgaaaaagagtaattcgtgacccaggtcacacctctcatttacgggttggcgaaagatcaaccaatgccgtatttatccacagaatgtgccactaagttaagcactgaaccactaaaaactggagtttcgtcgcacgtcaaggctgtaaatggaaacagtagtggaggtttttcacagttatcccagctttctgtggataacatggtgtaagatcctgtttattttcagtgaccagatttggaaaacccgttgcagtgttgcgcaactcgattaccggcaacctaaaaagcaatataaatcagagaattgaacaacgcatgtggaaaaagttacactgcgaatattcggcacataattgctgtttgttttttaatcaaggtatcatgacatgtcccaacctcgcccactgctctctcctcccgaaactgaagaacagttgttagcgcaagcacagcaactttctggttatacattgggagaactggcggcacttgtcgggctggttacgccagagaatttaaaacgcgataaaggctggattggcgtgttactggagatctggctaggtgccagcgcagggagtaaacctgagcaagattttgctgctctgggcgtggaacttaaaactatccctgtggatagtcttggtcgtccgctggaaacaacattcgtttgtgttgccccgttaacgggcaatagcggggtgacctgggaaaccagccacgtgcgccacaaactcaaacgcgtactgtggataccggttgaaggcgagcgcagcatcccgctggcgcagcgtcgcgttggaagtccgttgctgtggagcccgaatgaagaggaagaccggcagctacgcgaagactgggaagaattaatggatatgattgttctcggtcaggttgagcggattaccgctcgtcacggggagtatttacagatacgaccgaaagcagcgaatgcgaaagcgcttaccgaagccattggtgcccggggcgaacggattctgacgctgccacgcggcttttatttgaagaagaatttcaccagtgcactactggcccgtcattttctgatccagtaaccatcgctttgacctgccgctttccgggcatataattaccgcttcatttttttggcagggctttttagatgttatttgcatggataaccgatcctaacgcctggcttgcgctcggtacgctgacgctgctggagatcgttcttgggatcgacaatattattttcctttctctggtggtggcaaagcttcccacagcacaacgtgctcatgcgcgccgtctggggttggcgggagccatggttatgcgtctggcgctgctggcaagtatcgcctgggttacgcgcctgacaaatccgctttttacaatattcagtcaggaaatttctgcccgtgatttgattctgcttctgggtggcttgttccttatctggaaagccagcaaggaaatccacgaatccattgaaggtgaagaagaagggctgaaaacacgcgttagtagtttcctcggcgctatcgtgcagattatgctgctggatattatctttagcctcgacagcgtgattacggctgtgggtctgagtgatcacctgtttattatgatggcagccgtggtgattgccgtaggcgtgatgatgttcgccgcgcgcagcattggtgattttgtcgaacgccatcctagcgtaaaaatgctggcgctctctttcctgattctggtgggctttaccctgattctggaaagtttcgacatccacgtaccgaaaggttacatctacttcgcgatgttcttctctattgcggttgaaagcctcaacttgattcgcaacaaaaagaatccgctctgatactccgtacgctctcctgcgggagggcgtactcactccttttaccctcacagtttaagattttcctgctttcaagatatataacgtcggtttataaacagactattatcataggtaggccaaatgaggataaccggatgaaaaaatgggcagtaataatttctgcagtcggactggcgtttgctgtttccgggtgttccagtgattacgtcatggcgaccaaagatggccgtatgattttgaccgatggaaaacctgaaattgatgatgataccgggctggtgagttatcacgatcagcaaggtaacgcgatgcaaattaaccgtgatgatgttagccaaattattgaacgttaacaaataaggtcagcatccggctggccttaagatttttctctttcccttttcccttccctctgccatttttatattccttatgtcgtgattataaaaaggaaacggctatgcaatatcaccgtataccccacagtagcctggaagtcagcacgctggggcttggcacgatgacgtttggtgaacagaacagcgaagccgacgcccacgcacaactcgactatgccgtcgctcagggcattaaccttatcgacgttgccgaaatgtacccagtacctccgcgccccgaaacgcaagggttaaccgaaacctacgtcggcaactggctggcgaaacatggcagccgcgaaaagttaattatcgcctccaaagtgagcggaccgagccgcaataatgacaagggcatccgcccggatcaggcgctggatcggaagaatatccgcgaagcgctgcatgacagcctcaagcgcctacagactgattacctcgatctttatcaggtgcactggccgcagcgcccgaccaactgcttcggcaaactcggttatagctggacggattctgcgcctgcggttagcctgctggatacgctggacgcactggcagagtaccaacgcgcgggaaaaattcgttatatcggcgtgagcaacgaaactgcatttggcgtaatgcgctacctgcatctggcggacaaacacgatctgccgcgtattgtcaccattcagaacccttacagtctgttaaaccgcagttttgaagtaggtctggcagaagtcagccagtatgaaggggtcgaactgctggcctatagctgcctgggtttcggcacgctgaccgggaaatatctcaatggtgcaaaacccgctggcgcacgtaatacgctctttagtcggttcacccgctatagcggtgagcaaacgcaaaaagccgtcgcggcgtatgttgatatcgccagacgtcatggcctggaccctgctcagatggcgctcgcgtttgtacgccgtcaaccgtttgttgccagcactctgctgggcgcaaccacgatggatcagctgaaaactaacatcgaaagtttgcatctggagttaagcgaagacgtattagctgaaattgaagcggtgcatcaggtttatacttatccggcaccataagattaacgccggttaaaaccggcgttaaatattaatgacggcgctgccagatccacagcgccgttattgccagcgcaaacagcgcaccgaagccaatgccaatgggcacgaccgggatgcctatcattaccgccaggctgtaaatgcccagcatcaacaacatggcgctgttttcgccaaggttttgtactgcaatcgcattccccgccccgacgctttttttaccccgctcctgtagcaacgcattgagcggaacgacaaaaaagccccccatcacgccaatcagcatcaacaaggcataggctggcagcagctcgtgttgcagggaaaaaatcagtaccaccacgccaatcaaaatcccggctggcatacagcgactcacggtttccagcgtaactaacttcgctgccgcacctgcgccaaccacgataccaatcgctaccatcgcgttgagataggtgggcgtagcgttatcggtaatgcccagcgccaccggtacccacagcaccaacaggaaacgcagcgtgacacccgctccccagaataaactggtgcccaccaggctaaaacgcgtttcaccattgcgccataggctggtgcaggcattcaggaaactgcgggtcatgttgatgagattccaggactgccccggacgcgccgccgccagtttgggaatgtagatattggcaacgaccgcaccaccgtaggccagtgcgcatgcggccagggcgacgaggacatgccagtcagccagcacaccaccggctacggaaccgagcaaaatcgccgctatggtagaagcttccattaaaccgttagctttcactaacttactacccgtggttaattcgccgagaataccgtatttcgccggactataggctgcagcaccaacacccaccagcgtatagccgagaaacggattgataccaaagcagatactggctgcgcccagcagcttcaggccgttggcaaacatcatcacccggcctttggcgaagctatccgccacctgcccgacaaacggcgcaaaaagaatgtaagcacctacaaacaccatttgcaggatgggctggctccactccggatagaactgcgctttcagtaacgccagagtggcaaacagtagggcattatcgccaaacgcagagagaaactgcgccacgataaccgctttcatccccttgctccacaagctagtgttagtgtgcacactctcactcatcgtgttgttccgcttcgtctacccagcttttcaacgtgacaaagtcaggtttgccgctgccaagtaatggcatctgtttcagatagcgaatatcgcgcggtacagcaagctccggcacgccgtgctcgcgggcatactgttgcaacttatcgcgcgtcagttcgttatctgtggtgaaaagcaccagtgcctcgcctttgctggcatcgctcttaatcgcagtggcatggactttatctgggctaacaccaagtgccagttgttccaccatttccaggctcaccatttcgcctgcaattttggcaaagcgttttgcgcggccctgaatctgcacaaagccctgctcgtcaaaacgcacaatatcgccagtgtcataccagccgcgctccatttcgccgcgaacattctcggcggtgggcacttccagtacacctggcttctccacccgcagatagccgttcattatgttcggccctttcagttgcaggcgtccgccctcttcgataccagggacgctcaacaggcgcgcatccattcctggtagaatacgccctaccgtaccgggtttcgccgccatcggtacgttgatagaaacgacaggcgcgcattcggtcacgccgtagccttcaaggatgcgcaggccaaatttatcctgccaaagctgtttggtactttcttgtaatttttctgcgcctgccaccacatagcgtagacgatagaagtcatacgggttggcgaaacgcgcgtagtgaccgaggaaagtgctggtgccgaacaacacggtgcaactgcggtcatacaccaactccggcacaatgcggtaatgcagcgggcttggataaaggaacacttctgcacctgtaagcagtggcgtaaacaggcctaccgtcagcccaaaggagtgaaacagcggtaacgcgctcataaagcgatcgttggtggtgaagtcggcaatcgttttaatctgctcgacattcgccagaatgcttttatggctatggacgacgcctttcggatggccttcagaaccggaggtaaaaaggatcagcgcctcttcttccggctgctgtttaacctgtgccagacgcggcatcagcaaatgagcgaagatccatactttgtcggcagtggtgacatctgcttttaaatcttccagatagacccagcgcacctgagtaagttgctccggcagatgccagagtttgcctttatcgagaaactggcgggaagtgaagatggttttgatttcagccgccgtaatagcactggtcagcccttttaccccggcagtgtagttcatcattgcgggcatgcggcgacgggcgatggccccaaaaatcactgccgcactgatgcctgcattgggcagcattaagccgatgcgttcgccttcaacactgtatttttcaaggatgcgtccaacaaacagcgttttcgtaagcaatttgcgataggagtctggggtaaagttgacgtcttcgacacatttcttcccggctccgaagcggtacattgcactcagtaaagattcgtacagcgtttcacgcgggcgcaccgccattcgcgcttccatcattatttgatgcagcatttcgccagcgattttgcgacggtcacgggcacgcggcgcatccggcatcgccacctgcgttggtggcaaaatatgcagagtaatttgcgggaacaagcgacgtttaaccagacctttcaggcggctgaagtgcgtaagttccgccccttcaatacgcacaggaataaccgttgcaccagacttcgccgcgacaaaacccgcgccatcgtagattttcatcaggctgcctgtcgtggtgatgcgtccttcagggaaaatcaccactggtcggccctgttccaccagacgtaccagatgtttaatagccataggttgcgtcgggtcgagaggaacaaagtcgataaaacttttcagccaacgcatataccactgttggcttatactggtgtaaacggcaaacactggacgcacaggtaaaaacagtccaagcaaaatgccatcaataaaagagacgtgattaggcgtaattagaacgcgctcgcccttcagtgcctgggtgtcacccgtaacgcgaacgcgatacaaaacacggcacaaatttcgaaaaaagctaaaaagcattccaactccctttgctctgattcagtaaaagcgaatggagggagattacacgagataaagaacgcgagcgacagtaaattaggtgcgaaaaaaaacctgcgcatccgcgcaggttggtgcaagagacagggtacgaagagcgtaccgaataatctcaccaatcaatacctctgggatcttgattgtggtctgcacgacgactcttcgccagcgagaaaacgcaaaggaatgaagggaaatgcaacgaggtgtgtaaattgtcggttactgttacagattgatgaccggcaaaaaaaacctgcgcatctgcgcaggctggtgtaattcatgtgctcaacccgaagttgacttcacctatcaatacctctgggatcaccactttagcaacctgaagccaaacgccaccagcggtcaatcgcaacagcgtttcgcaaagtgtaaccaaaggtttgcaatctctttttttgtcttacttatttgcgtttggctcacattcccacgatgaaaacacgccaccccttgaaccaacgggcgttttccgtaacactgaaagaatgtaagcgtttacccactaaggtattttcatggcgaccataaaggatgtagcccgactggcaggcgttagtgtcgccaccgtttcccgcgtcattaataatagtcccaaagccagcgaagcttcccggctggctgtgcatagtgcaatggagtctcttagctatcacccgaacgccaacgcccgtgcgctggcgcagcagaccactgaaacggtcggtctggtcgttggtgatgtttccgatccgtttttcggtgcaatggtgaaagcggtcgaacaggtggcttatcacaccggtaattttttattgattggcaacggttaccacaacgaacaaaaagagcgtcaggccattgagcaactgatccgccatcgctgtgctgcgttggtcgtccatgccaaaatgatcccggatgctgatttagccagtttaatgaaacaaatgcccggtatggtgctgatcaaccgtatcctgcctggctttgaaaaccgttgtattgctctggacgatcgttacggtgcctggctggcaacgcgtcatttaattcagcaaggtcatacccgcattggttatctgtgctctaaccactctatttctgacgccgaagatcgtctgcaagggtattacgatgcccttgctgaaagtggtattgcggccaatgaccggctggtgacatttggcgaaccagacgaaagcggcggcgaacaggcaatgaccgagcttttgggacgaggaagaaatttcactgcggtagcctgttataacgatagtatggcggcgggtgcgatgggcgttctcaatgataatggtattgatgtaccgggtgagattagcttaattggctttgatgatgtgctggtgagtcgctatgtgcgtccgcgcctgaccaccgtgcgttacccaatcgtgacgatggcgacccaggctgccgaactggctttggcgctggcggataatcgccctctcccggaaatcactaatgtctttagtccgacgctggtacgtcgtcatagtgtgagtactccgagcctggaggcaagtcatcatgcaaccagcgactaaccgcagttaaagcaattccagcgccagtaattcttcgatggtctggcgacggcgaatcaaccgcgcctgaccattatcaaacagaacttctggtaacagcggacggctattgtagttggaactcatacttgcgccatatgcccctgtatcatgcagtaccagataatcacctgccttcacttccggcaaggcgcgggtttcaacatttcccccttcctgctgggtaaagacatcgccgctttcacataacggtccggcgacgacggtttccaccgttggcgcgtgttccagagaacgaccatcagctgccagggcactgatatggtggtaactaccgtacattgccgggcgcatcagatcgttgaacccggcatcaaccagcacaaagtggcggctccccatttgtttgacgctccgcacctgagtaattaatacgccagactgcgctaccaggaagcgacccggttcaatttccagtttcacagggtggcccaaatggcgggcgatttgctcacgcgcggcattccacagaccataataatgttcggtatcaaccgcctcttcaccctgttgataaggaacagaaagcccaccgcccgcagaaatagcctgtaaatcctgaccgaattcgatgacctgacgcaccatagcaccacacacctgttccagatgggcataatcaacgccagaaccaatgtgcatgtgaatgccgaccagctgcagatgatgacgttgtatcacgtccagtgcggcgggcagatcggtgtaccagataccgtgcttgctgttttcgccaccggtattggttttttggctatgtccgtgaccaaaccccggattaacgcgcagccatacccgatgccctgggctaacctggcccagttggtcgagcatatcaacagaacccgcattcaccggaatttgcaattcactgacgcgttcaagcgtcgcctgatcgataacatctgccgtaaaaacaatatcatcggggtgcgtttgcggattgtaacccgccgccaacgcacgctctatttcgcctaagctgacggaatccactttcacgccctgctcacgcattaagcgcaaaatatgaatattggaacaggctttctgtgcaaagcgcaccacatcaaactgtttcagcgctgcaatctgccgacgaataatttgcgcatcgtagacccacaccgggcagccaaattcagcgggcaaacgcagcagattttcggcggtgagatcggtatcggtgctgaacagactatgtggcataacaaactccagataagtgcttttttatgattacgccacatcataaaaagaataaaaaatatcgatttatgtcgagtctatgcaaaaatgatatggattaccggattgcgagagagcgctaatggccgccgttaacttacgtcatattgaaatttttcatgcggtaatgaccgccggaagcctgactgaggcggcacacctgctacacaccagtcagccaaccgtcagccgcgaacttgcgcgctttgagaaggtgatcgggctgaaattgtttgagcgcgtacgtgggcgattacatcctaccgtgcaaggactgcgtctgtttgaagaagtgcaacgatcctggtacggactggatcgcattgtcagcgccgcagaaagtctgcgcgagtttcgccagggagaactgtctattgcctgcctgccggtctttagccaatcttttttaccgcagctcctgcaaccctttctggcacgttatcccgatgtcagcttaaatatcgtgccccaggaaagtccgctacttgaagagtggctcagcgcccagcgtcatgatttaggactcactgaaacgctccatacgcctgcgggaacagaacgtaccgaattactctctttagatgaagtgtgtgtgttacctccgggtcatccgctggcggtaaaaaaggtattaacgccggatgattttcagggtgagaactacatcagcctttcccgtactgacagctatcgccagttgctggatcagctatttactgaacatcaggttaaacgacgcatgatcgtagaaacccacagcgccgcgagtgtctgcgcaatggtacgggcgggggtaggtattagcgtggttaacccgctcaccgcactagattatgcggcaagcggtttagtggtgcggcggttcagtattgcggttccgttcaccgtcagcctgatccgccccctgcaccgcccgagtagtgcgctggttcaggcgtttagtgggcatttacaagcggggttaccgaaactggtcacttctcttgacgctattttgagcagtgctacgacagcataattagctcagcataaaagcgacagcatcctcggcatggatcgccgcggtatcaaacacaggcaaaacactgcgctcttctggcaccagtaaaccaatttctgtgcagccaaaaatgacgccctgtgcgccctgttctgcaaggcgagcaatcacttgcgcacaataagcgcgactcgcttcggtaaattgccccagacacagttcttcaaaaataatctgattaattttcgcccgttcatccgcttcaggaataagacaattgatggaaaattgttccgtcagccgcccgcgataaaaatcctgttccatggtgtaacgcgtacccagcagcgccacacgagtcattccggccccggtaattgcacgtccggtggcatccgcaatgtgtaagaaaggcagagtgcaacgactctcaatggcatccgccactttatgcatcgtattggtacatagcacaataccttctgcgcccgcccgctgtaagccaagcgccgcctcagccagaatgtccccggttttatcccattccccgcgacgctggcactcttctatttcatgaaaatcgacgctatgtagcagcacttgcgcagagtgaagcccaccaagccgctgtttaatgccttcatttatcaaacgatagtaaggaatggtggattcccagctcattcctcccagcaaaccaattgttttcattcctctctcctgatgtgtgttaccgcaacaaggctgaataaggaacgagacaaacgcctcaacggccaagtgcccaatctctattaacgaaaaaagggccggatgtacagcacatccggcccgtgaaatcagacgccgatatttctcaacttctcgcctgccatcagtttgcgttcgatatgttccagcgtgacatttttggtttccggaatgagccagaaagtaatgcccacaaacgcaatgttcagcgcagtgtagagccagaacgtaccggcagcgccaatgctatcaagcagtgtcaggaaggtcgcgccgataatcatattgctcacccagttcgtggtggtgctacaggtaataccgaaatcgcggcatttcagcggctgaatttcagagcacaggatccacaccactggcgcggcgctcatcgcataaccggcaatacacatcatcgtcatgccaacagagagccaggacaagccactggaagccgtaccgttatcaaactgcatcaggcaatagcccagcaccagagtgcctaacgccatcacgctgaaaccaattttcagagccggtttacgccctgctttatctaccgtaaacaccgcaataaaggtggcgaacataaaggtcagccctacgaccagagtcgcaatcatctgttgttctgtggtcgtaaagcccgccattttgaagatacgcggcgcgtagtacatgatgatgttcataccggtaaactgctgcatcgcctgcaacaacataccgagaaacacagcacgacggacgttacggttgatcttaaacagtgcccaaccgccctgttttaacttcaggctttcacgaatttcgttgagttcttctcgcgctttttcgctcgtatcgcgcagcatacgcaatacttcttccgcctcaatatgacgccccttttccgccagccagcgcgggctatttggcaggaagactaccagaataatcagcagaactgctggtaaagcaagaacccccaacattgcgcgccagttaccgctataactgaacgctgtatcggataaaaacgccagcacgatgccgagtgtgaccatcaactggtacatactgatcatcttaccgcgaacgttttcacttgccatttcagaaagatacagaggagcggtgtaagacgcgatcccgacagcaatgcccagcaccacacgagcggcgattaacatctctacgctggtcgcaaaagcggaccctatagaaccgagtacaaacaggatggcccccgccatcaggctgtatttacgccccaggcggaagctcagccaaccattaaacagcgcaccaattgctgcaccgagcatcatgctactaaccacccattcctgcaaacgactggtcagcacaaagtgatcggtaatgaacggcaacgctccggcgattacgccgatatcaagaccaaataacaatcctgcgaccgcagcagctacgctaacaaacatattcatacgccgcgtatcccgcaaagaacgtggcgttaaagcagattccgtattgatagtaaccattttttcctgccagcagagagtaagacatagtgaaaaaatacgtgaacaactcacgcaggtgtcaggtcggaaacagcataaatatggattaaattgctgcgacatgtcgttatgtgatggatattccaattttcaaattaagttgaattattgagattattattaaccacctaattttacagcagataaaattcataaagttcattaattgataattaatatggattatttcataaccatgatatggattatgatgatctacaggtataaaaaaccctgccatgcggcagggtcataaaagtaagaagaatgaattaacgcgccagccaaccgccatccacggcaatggtataaccattcacataatcactagcgctggaggcaaggaacactatcggccccatcaggtcactcggcagtccccaacgaccagctggaatgcggtcgagaatttccgcgctacgttgttcatctgcccgtagttgttgagtattgttggtcgccatgtaacccggggctatcgcattaacattaatgttgtgtttagcccattcgttcgccatcaatcgcgtcacacccatcacgccgcttttacttgcggtataagaaggcacacggatcccgccctggaaggagagcatactcgcgatattgataatcttgccgccattgccttgcgcgataaagtgtttcgccgctgcctgagacatgaagaatacgctcttgatattcaggttcatgacatcgtcccagtccttttcgctgaactcgagagcatcttcgcggcgaatcaatccggcgttattcaccaggatatcaatatgaccaaactccgctaccgcgcgatccagcagtgctggaataccatcaatctttcgcagatcggcggtcaggcttaaaaaacgacgccccagcgctgtgacctgctcgatggtttcagtcggttcaacgatgttaatgccaacaatgtcacagcccgcttgcgccagccccaacgccatcccctgacccagtccagtatcacaaccagtgacgaccgcaactttaccttcgagagaaaatgcacttaaaatcataacaataccttattcgtttatgcccacaattagcgcaaatctttaacggccacatggtccatatcatcaaagacctggttttcaccgaccatgccccagataaaggtataagctttggttccgacaccggaatggatgctccagctcggggagatcaccgcctgctcgttatgcatcacaatatgacgcgtttcttgcggctgccccatcatgtggaaaacgcaggcgtcatcatccatattgaaatagaaataaacttccatccggcgctcgtgggtgtgacacggcatggtgttccacaagttacccggagccagctccgtcagccccatactcaattggcaggtttccagtacatccgggacaaaatatttgttaatcgtgcgacggttactggtgaggttatcgcctaacgtgactggagatacttcgtccggtgtgacttttttggtgggatacgtcgtatgcgcgggtgcgcaattgtaataaaacttcgccggagtgccggtatcaatactggcaaagacaacttcttttgcacctttaccaacatacagggcgtcgcggtgaccgatttcatagcattggccatcgacagtaatcgtaccggcaccgccaatattgataacacctaactcgcgacgttcaaggaaatagcttacgccgagttgtttaccaacttccccgccaacggaaaccgttttagttatcggcataatgccgccaacaataattcggtcaatgtggctgtaaaccatggtgtactcatcggcgacaaataccttttcaaccaaaaattcattgcgcagcccttgggtatccagcgtttttgcgtgcgcactgtggatgctctgtcttacgtccacatcaacctccgataatcagtgaagcgtgaaaatagaaaacgatagtgaaacactgtttcgttttctctataaagggatgatatgcccatgggctagggttttcaattaaaaataaaacaatgtttcatttttaagttaaggattaaaaaaagtgcagtgtcgatcacgaatatgtcatgagaatggaaaaatgagggagcccagaaaatgtatgtcgacttgccagccatcattattcaacagattaatgacggcagatatttatcggtaaggaggaaatgcagagttattcgtcacgttcaatggtcaatgccacaccctggcccccgccgatacaaagcgttgccagtcctttgcgggcattacgtttcaccatttcatgaaccagagaaaccaggattcggcaaccggaagcgcctatcgggtgaccgagtgcgatcgcgccaccattgacattgacccgacgctcatcccactcaagcatcttgccaacgctaagcgcctgtgcagcaaacgcttcattagcctcgataagatcgacttcagccaactgccagcctacacgctccaggcaacggcgggtcgcatacaccggcgcaattcccatcaatgccggatctacaccaacgctggcaaatgcgcgaatgcgggccagcacgggtaaattcaacgctcgtgctttggcttcgctcatcatcattaccgcagctgcgccatcgtttatggaacttgcattacccgctgtcacagaaccgagactatcaaaactaggatttaaacgggctaagccttctgcgctggcgtcagtgcgtggctgttcatcggtatcaacaaccaacgtctgcccgttactttgggtcattaccgggacgatctcatctttaaatcgtccggcgtcaatcgccgctcgcgctttttgttggctgctaagtgcgtaagcatcctgcaactgacggctgatgccatattcgcgagccagattttcggcggtgacaccaatatgataatcattgaaggcatcccacaacccatcatgcacaagactgtcaaccaactggctattgccaagctgtgcaccggtgcggctatcagtcagaacatgtggtgcgcggctcatgttttcctggccaccggcgatgacaatatcagcctcgccacactgtatcgcctgagtagccagatgcagtgctttaagcccggaaccgcaaacgtcattaatagtgattgcagaaacgctattaggcagaccacctttaatagcgctttgccttgccggattctgccctgcccctgcagtcaacacctgaccaagaattacttcatccaccgcatatgcaggaacgccggtacgttctattaacgctttcacgaccagactaccaagttccacggcggaatgacccgctaacgcaccacgaaagcagccgataggtgtccgtaacgccccgacaatcacaacgtctttcatcacaacctcgcaccaattaacagtgcaatagtaaatgattgttaattacagttatcttaattgtttaaaaaaagtgatttttatcacaaaggaaatatgcctgagcagcagtcagagacataactggcacgtaaggtttgcaaccactaacccaccaatagaggggtagatagggcgttaatctcccatacttaacctggtttatggtaaattgccctccattttgtttaatttgtagatgatacgttcagataatgtctaatatttggtctaaagaagaaactctgtggagtttcgcgctctacggcacagccgttggtgcaggcacgctcttccttcctattcagttaggtagcgcaggggctgtggtcctgtttattactgctctggtcgcctggcctttaacatattggccacataaagccttgtgccagttcatcctcagtagtaaaacaagtgcaggtgaagggataacgggcgcggtaacacactactatggcaagaagattggtaatctgattaccacgctgtacttcatcgccttttttgtcgtcgtgttgatatatgcagtggcaattaccaacagtcttacggaacagctggcaaagcatatggttattgatcttcgcatccgtatgttggtgagtctgggtgttgtattaattctgaatctcatttttctgatgggacgtcatgccactattcgggtaatgggatttttggtattcccattgattgcctatttcttatttctttccatttaccttgtcggtagttggcaacctgatctattaacaacccaggtagagttcaatcagaatacccttcaccagatatggataagcattcccgtgatggttttcgcctttagccatacgcccattatttctacgtttgccatagacagacgtgaaaaatatggcgaacacgctatggataaatgcaaaaaaattatgaaagtcgcttatctcatcatctgcataagtgtactgttctttgtctttagctgcctgctttctattccacctagctatattgaagctgctaaagaagaaggggtcaccattttaagcgcgctttctatgctgccgaacgccccagcatggttgagtatttccgggattattgtcgcagtagttgcgatgagcaaaagtttcctgggtacgtactttggcgttattgaaggtgccacagaggtcgtcaaaacaacactacagcaggttggtgtaaagaaaagtcgtgcatttaaccgcgcactaagtattatgttggtaagcctgattaccttcattgtttgttgcattaacccgaacgcgattagcatgatttacgcgatcagcggcccgctcattgccatgatacttttcatcatgcctacgctgagtacgtatctcatcccggcgcttaaaccctggcgttccatcggaaatctgattacgctgatcgtgggtatcctgtgcgtaagcgtaatgttctttagctaatatcagttgtggatggttcaaaattgctacaattttgaaccattccatttttcataatattcatttgttattattccaccctatcacttctctcgtcatatcctagtattatcagttagttaaacacacaaagagatctgaacatcttaaataagactatttaagatgcataacttagattcgcaagatatcttctggtcattcaaaaacaatttgcgatatagatattcttataccatgagatagttatctggaccgctctcaaccatgcaagattaaatcagtgaaacataatcatatttgataacgagaaatgcatttttaaatgccttactcagaattatagcaaatacagattaatcgcaatttttcccggcaaaattacaaaatcatggtgtattgacatcatcaataaccaatgaaattatgcaattatatacggatagggaggttcttaacatggggctttgtagtcgttataaaagtcttacatgcaatagttgcagtatgcattgccaaataatgccagaagagagtccgcgtttgcagtattgcgcaaacagctgtttttgtatgtggcccgaagaaagtagttattttaatcgtggtgtggtagaaggtatcttaacaaaaaaccacaatgcgagattaagcggatatatttttgtcgattttagtgtaagttttttacgtctattccttgaaaaagactggattgactatcttgcaagtactgacatggggattgttttagtcagcgaccgcaatatgcaaagcttagctaattactggcgaaaacacaacagtgcaatatctgctgtcatatataatgatgatggtcttgatgttgccaatgaaaagatcagacaactatttattggtcgttatttaagttttaccggaggtaacacattaactcagatggaattcaccataatggggtatatggtttctggttataatccatatcagattgctgaagttctggatatggatatccgtagcatctacgcgtacaagcaacgaatcgaaaagagaatgggtggtaaaataaacgaattatttattcgtagtcatagcgtccaacattgatactcaacgaccagccagaatcatactctgtttatacgggcatttattgaaatgtccgtattttataaataggccgtcccctcaagagtaaacaccatagtatttaaaaccatcacacgaaaaattcagaagcattacgaaatatgaatttacaaacaatagtggcataaatgttaaccatgttaatttacgtaaagttttacgttgcaacattaaagcctcatttcaatcatcatgataaatataaaattaatatatatttatgccgtaaataccaatatacttagcaaactatgtgatctccatttcgattgatttagtgtttattgacgtatgtactggattattaacgataatatcgagttctggcctgagcaccgaaaattaataagcgtacataacgccgatcttaacgtcgttctgacaacgccagccagtcgatgtttaagtcttctacttgaagcttttcctgatgtggttgcacaacaagattttttcaccagagtctgggaagaagaaggtatgcgtgtgcctactaacacgttatatcagaacatatccattatcagacgcggatttcgcgctgttggtgatactacccacagcctaattgcaaccgtgccgagaagaggattcaagatccataatgacattaacatacaaaatcatgtaataaacagcagtacagacgcacatacacacaatgccccacctgccataaaagttaatgcgggatacaaagagagcattggtggcgcaaagaatttcaataacaaaatcctcaaacatataaaaagtcatctaattatgttgagcgcatttgtcataggcgcatattctgcatattggctatggaataataatcaaccgaagccatttttcaaggattacaagactgttgcggaaattaatggctgccattttaatgtaacagaagatacaattgatgggttgaaagagttcgataaatataaaacacggatactggatagcgggattaactgtaaaaaacatccgtggttatacttccctcttgcaaaatccagtccggggatgattgttatggcatgcaataaaaactataaccaacatgaagtggcaaactgtttaaccctgtcttaccgtgaggttaatcgtgattgattataaaaaaaacttattatttattttagtttttatcagtgggtttattctcttcactgtctattcttacactgcagaaaaaatgatatataacgaaacatgcactgcaaattgggtaatttttaatgaccagggacgagcaaatcttaccatcgactttatgtataacaaaaaaaataaaacaggaactgttgcgttgagtggaacctggcaacaaggtaacagagaaagtaaaagtatacggcgaaatattgaatacacatggattgaaaactatgacacagcccatttaacaagtaagaaagttaataagtttgagattatggatcaagttgatgatgatagacttgcacaacttattcctgatttttatgtctttccagaaaaaagtgtaagctataatatactaaagcaaggtaagcatgcttttattttgagcattggtaacagagcaataatgcattgtgcaaggtaaactaaaatagataacaaaaagatggaacctcgttaatcataaaacaataaaattaaatattctcgcagtatatggcagtctaaagcatcaaagatttgatcaacatctttcattttagacatctccttgcaatgtaaaatatcatgtatcaacaacatctggtgcaaatccaactgtcgaactcgacattcatcttagctcgattattattccttcgtacagtgcttgtaaacaatacagaaagaggattattaagaaccagtttactcagactatcaatagaggaaaggactaacgtttctttaaaagaattgatttcatcatctgttaaactaaactcatcattgacagatcgactgatataactgtttttaactttactctttacgttgactttattgacagaattaacattcacatatctactatttaatgtccaacttgttgtttgcgtgagaacattctcagcattaaggaatttttttaacggaatccttggtttctttttgctgtcgctatttacaatatcatgcatatagaccatttcatgaatctggctaaattcaatgtccattgtatacctcacatttttaccgtgactcgatgttactgttcaataatcaccttccatcaatactaaaattaatacccctaatgtgccgataacaaatatagtcattctacgtaacgtctccataaggtgatatttgacattatcagaagctgcgaattcggattttgctctaatcaaatgagagaaatgtaaaatgaagccacgaaatattaataatagcctaccactgcaaccattagttcctgatcaggagaacaaaaataagaaaaatgaagagaaatccgttaatccagttaaaatcacaatggggtctggtttaaattatattgaacaagaatctcttggaggaaaatatctaacacatgatttgagtataaagatagcggatatttctgaagagataattcagcaagcaatattatctgctatgagcatatataaatttagcataacagatgatttaatgagtatggctgtaaatgaactcataaaactgaccaaaatagagaataatgtagacctgaataaattcactactatatgcacagacgttctatccccccgcgtcaccagacataataaagaaaaaaacaaacgacattctacccttctcaaaaatcccctttttaattttcattgaaaaaatggcaattgatactatgaatccaggtcatacacattaaggcatttatgtaatgtcgtaattaagataactaataaggtgaatattagtaaaacaactaatgatgttattagtttgtagtgaacagtacttttaccaataatgaaaaatataccataagcaatgcaagcttaaaactcataatttaaaaaagataaatataaaaatatcaatgagtcaatcaataataatttggcatcacgagacacatcacagaggaatattatgagcacagaaacaattgaaatattcaataatagtgatgaatgggcaaatcaactaaaacacgcattaagcaaaggagaaaatctggcattactacatggtttaactcctgatatccttgatagaatatatgcatatgcattcgactaccatgaaaagggtaatataacggacgcagaaatttattataaattcttgtgcatttatgcgttcgaaaatcatgagtatctaaaagattttgcaagtgtatgtcagcccaaaaagaaatatcaacaagcatatgacctttacaaactaagttacaattacttcccgtatgatgactatagtgttatttatcgtatgggtcaatgtcagattggggctaaaaatatcgataacgcaatgcaatgtttctatcacattattaacaattgtgaggatgatagtgttaagagtaaagcgcaggcatatattgaactcttaaacgataatagtgaagataatggctaagcattacaatcatttggttaaatttgctggttatagtgcagttaaccactataaccagcacctcttatgttttcttaaatcagcatcttaaaacagttaagagcatactataaatcattatttttcaatgcgttagagaacaatctactttatcaaaattgaataaggctatttcagattacatcactgaattcctaagataaattagtgaacacaaccatagatatgtcaaatgtaatttcctgtagcgttaatgacacataaatatgaatagccataatttctattgcttaagcaggatgcaagaaaccaattttttcatagaggttaactaatggacttagaaaataaattcagttatcattttcttgagggattaacgctcacggaagatggaattcttactcaaggaaatgagcaagtttatattccacagaaagagttaggtgtattaatagtattacttgaatccgctggtcatgttgtactgaaagatatgatcatcgaaagtgtatggaaaaatattattgttagtgacgagtccctgacaagatgtatctattctttgcgctgcatttttgaaaaaattggctatgatcgttgcatagaaacaatctaccggaaaggttatcgtttcagcgggcaggttttcaaaactaaaattaatgaagataatactagtgactattccatagctatattccctttcactactagtttgaatacactggatccattaatacttaatcaggaattagtgcaaatcattagtaataaaaaaatcgatggtctctatacctatccgatggctgcgacaaatttttgtaatgatcacatatctcaaaatagtttcttgagcagattcaagccagattatttcgttacaggaagaataaaccagaataatgcagtgaacactttatacattgagttgatcgacgctaaaaaccttttcctcatcgccagtaatcatctccctgttgatgaactacataatacaagtcaatttattatagataatatccttcaaacggtacataaaccagaacgatctgtaagattagctaagcaggaccaaggatataagaatcattatttaagtgatgaaatgttagccggaaagaaagaactttacgacttcacccctgaaagcatttacagggccatgactatatttgatagattacaaaataaaagtgatatacagacgctaaaaacagaatgttattgccttctagcggaatgccatatgtctttggcacttcatggaaaaagtgaacttgaacttgctgctcaaaaagcattagagcttttagattatgtaagtgacataaccactgtcgatggaaaaattttagctattatgggactgataactggtctgtctggacaagcaaaagtatctcatatcttatttgaacaggctaagatacacagtactgatatagcctctctctactactatagggcactagtccactttcataatgaaaaaattgaagaggcaaggatttgtatagacaaaagtctacaactcgaacccagaagacgaaaagcagttgtgataaaagaatgtgtagatatgtatgtgcctaacccgctcaaaaacaacattaaactctactataaagaaactgagagtgaaagccatcgagttataattgacaacattttgaaattaaagcagctgacgagaatttgtatgcgataaatttttattgacgcaattttattatttagatgtatgcaacttgttatttaaacaacagagataaaaatatctaagatattcaccttattgcaagatatttaaaatgctctagagttaaaagtatgatgtaaagaccattggcctggacaattaaaaaagggagctttatgactaatccaatcggtatcaataatttatctcaaagtagtaatatagcgaatgcaacgggtgatgaagtcgtaagtttagataaacacatcaacaccagtgctactgatacagatcaaatacaagcatttatagttagtacatggatggcgccttttcaaaatgatatgtatagtgaagataatcctatcagtccttactataaaattgagtggtaaacgattgaccaaataaatcataacgagatacttttataatagtatctcgttcctttcattcaatcctcacacatgaaaaaatatgcgctcaccaaaagttaaattcttaaccatcttcacgttttgtatatttattacaaaaatgtctttcgccagcaactcttgctctaatgaagcaggaacaatgttcagaatcgaaccaaatttaattaaagctatcgctcttgttgaaagcaatctaaaaaaggatagcataggcaagaacagagataagaataacaatataaagagtttagattattggttaatgcagataaaccagatgcatattcccctgttaaaaaaacgtggaataataaaagatgaacgagatttgttagataacccttgtctgaacattaaaataggaaccgagattttatataaccattttagtcgttgtggagtaacgtggcaatgcctggggacttataatgcgggttttgcaatggataaccaaaaaaagagacagcaatatgccccaaaatatatattgtatataccaggcttaatgaactaaacaatcgtaaggcttcagcaaaatgagcctaaagcctcttttttttatatagtgcaaacacccatacgtaaagctgttttgatcaactcgataccactgtgaacatctaatttcttcatgatattgagtctatgagtttcgactgttttcctgcttaactgcaagaaattagcgatttctttgtttgttttaccatcagctatgagttgtaatatttcactctcacgatttgtaagttgattatcagaggaatacctggaagatattttttcacaatccatatgtacactatcaaaataagtgtaaccattactaatgctatcaatagcacgatttagtttcgccgggtgactggttttccatacgcatcctttcgcacctgcttcaagcaattttatactatcaatatacggcatctttgctacaaatgtaataatatgagcatctatcttatggcttttaacccattttacgagttcggcccccatcattccacctgcaaattctcctaaaataaatatttaggctgtagatttgttacactccgctatagctttcttcagatctttatagcccacttatttaacaacttgaaaataaggtgttttacctgggttgttacaaaaggattgcattgcgtaaacgctttttatttacaacaaaatggggaagtattacggcgaagataaattggagcgggcgaagggaatcgaaccctcgtatagagcttgggaagctctcgttctaccattgaactacgcccgcttcgagatgcgtaaggcattataaaccttacgctctccttagcaagtgccacgctgctgactgctgattaattcgccatcagcattttggcttgctgccctgaggcggcaagtaacgtagcggatcaattgccgttgcacggtaacgaatctggaaatgcaggcgaacagatgccgcatccgtgctccccatagtggcgattttttgcccagccttcacgctttgcccattatttaccagcatcgtgtcattatgggcgtaagccgtaatgtaatcttcactgtgtttaatcatgatgagattaccgtagccacgcagctggttgcccacatacaccacctttcctgcacccgcggcgtaaataggtgtaccccgtggagcactgatatcaatccctttattgccgccatctgctgtgctatacggcatgataactttccctgtcgttggccataaccaacaacgttgccctactggcggccaggaacttttcggtaccgcactactcggtgtaacgcttgcggttttggtcgtacttttggcggtacttttacgtgtaatactgctacttttcgccccacccagttttagtttctgaccaacttcaatggtgtaagggggggaaatgccgttcagtcgcgccagttcttttacgctggttcccgtggtgcggctaatacgatatagcgtatccccccgtttcacggtgtaaacggagccggaatacgttcctgtatcggaacttttgctaccgctacagcccgccaaaagcagtccaacgcttaacaacatcacgatacccagagattttttattcaggcgtcccgcactcaaaatctttcctcgcttaaaaaacaagacgccttatcatagcagccagcctcttgatacccaatctcttgcttctggaaaaacgtggtaatagagaaagaggttaatttcatttggcaaagggaagtatcatcagcaaaatattcgctgtagaggtatcgaacttcctgactttttaccctatttcccatcctgatgcgtaataatcccaatttatcacattgattttatcgccactcatattgatacgtatcactgcccctattcagagtcctgtttcgtatcatatctgtgtttttttaacgtcatcacacttcctacctcccctaacgcttatcgtcgtttctggcgtaaatcttgcctgcttagactaaatctttgccataagaaccaaatgttcaaatcgaggggatttctatggaagcgcgggaagcaaccgctacgggtgaatcatgcatgcgcgtcgatgccattgctaaggtcaccgggcgggcacgatatactgacgattatgttatggcgggcatgtgttatgcgaaatatgtacgtagccctatcgcacatggttatgccgtaagtattaatgatgaacaagccagaagtttgccgggcgtactggcgatttttacctgggaagatgtgcctgatattccattcgctacagctgggcatgcctggacacttgacgaaaacaagcgcgataccgccgatcgcgcactgctaactcgccatgttcgtcatcatggtgacgccgttgccatcgtcgtggcccgcgatgaactcacggcagaaaaagcggcgcaattggtcagcattgagtggcaagaattacccgttatcaccacgccagaagcggcgctggcagaagacgctgcaccaatccataacggtggcaatttactgaaacaaagcacgatgagcacgggtaatgtccaacaaacaatcgatgccgccgactaccaggtacaggggcactatcagacccccgttattcaacattgtcacatggaaagcgtaacaagcctggcgtggatggaggatgacagccgaattaccatcgtttccagcacccagatcccgcacattgttcgccgcgtggttggtcaggcgctggatattccctggagttgcgtacgagtcatcaaaccatttgtcggtggcggttttggtaataaacaggatgtactggaagagccaatggcggcattcctgaccagcaagcttggcggcattccggtgaaagtttcccttagccgtgaagagtgtttcctcgcaacccgtacccgccacgcttttaccattgacgggcaaatgggcgtgaaccgcgacggaacattgaaaggttatagtctggatgttctgtctaacaccggcgcttatgcatctcacgggcactccatcgcttctgcgggggggaataaagtcgcttacctttatcctcgttgtgcctacgcttacagtagtaagacctgctataccaacctccccagcgctggtgcgatgcgtggttatggcgcgccacaagtcgtatttgccgttgagtctatgcttgatgacgccgcgacagcgttaggtattgatcctgttgaaattcgtttacgcaacgccgcccgcgaaggagatgctaatccgctcacgggcaaacgtatttacagcgcagggttgccggagtgtcttgaaaaaggccggaaaatctttgaatgggaaaaacgccgtgcagaatgccagaaccagcaaggcaatttgcgccgcggcgttggcgtcgcctgttttagctacacctctaacacctggcctgtcggcgtagaaatagcaggcgcgcgccttctgatgaatcaggatggaaccatcaacgtgcaaagcggcgcgacggaaatcggtcagggtgccgacaccgtcttcagccaaatggtggcagaaaccgtgggggttccggtcagcgacgttcgcgttattagtactcaagataccgacgttacgccgttcgatcccggcgcatttgccagtcgccagagctatgttgccgcgcctgcgctgcgcagtgcggcactattattaaaagagaaaatcatcgctcacgccgcagtcatgctacatcagagtgcgatgaatctgaccctgataaaaggccatatcgtgctggttgaacgaccggaagagccgttaatgagcttaaaagatttggcgatggacgctttctaccaccctgaacgcggcgggcagctctctgctgaaagctccatcaaaaccaccactaacccaccggcgtttggctgtacctttgttgatctgacggtcgatattgcgctgtgcaaagtcaccatcaaccgcatcctcaacgttcatgatagtgggcatattcttaatccactgctggcagaaggtcaggtacacggcggaatgggaatgggcattggctgggcgctatttgaagagatgatcatcgatgctaaaagcggcgtggtccgtaaccccaatctgctggattacaaaatgccgaccatgccggatctgccacaactggaaagcgcgttcgtcgaaatcaatgagccgcaatccgcatacggacataagagtctgggtgagccaccaataattcctgttgccgctgctattcgtaacgcggtgaagatggctaccggtgttgcaatcaatacactgccgctgacgccaaaacggttatatgaagagttccatctggcaggattgatttgaggataacatcatgtttgattttgcttcttaccatcgcgcagcaacccttgccgatgccatcaacctgctggctgacaacccgcaggccaaactgctcgccggtggcactgacgtactgattcagctccaccatcacaatgaccgttatcgccatattgttgatattcataatctggcggagctgcggggaattacgctggcggaagatggcagcctacgtatcggctctgcaacgacatttacccagctaatagaagatcctataactcaacgtcatctcccggcgttatgtgctgcggccacgtccattgctggaccgcagatccgtaacgtcgctacctacggtggaaatatttgcaacggtgccaccagcgcagattctgccacgccaacgctaatttatgacgcgaaactggagatccactccccgcgcggtgttcgtttcgtcccgattaatggctttcacaccgggccgggcaaagtgtctcttgagcatgacgaaatcctcgtcgcctttcattttccgccacagccgaaagaacacgcgggcagcgcgcattttaaatatgccatgcgcgacgcaatggatattagtacgattggctgcgccgcacattgccgactggataacggcaatttcagcgaattacgcctggcatttggtgttgccgcgccaacgccgattcgctgccaacatgccgaacagactgcacaaaatgcgccattaaacctgcaaacgctggaagctatcagcgaatctgtcctgcaagatgtcgccccgcgttctagttggcgggccagtaaagagtttcgtctgcatctcatccagacgatgaccaaaaaagtgattagcgaagccgtcgccgcggcggggggaaaattgcaatgaatcacagcgaaacaattaccatcgaatgcaccattaacgggatgccttttcagcttcacgccgcaccaggcacgccgctcagcgaattactccgcgaacaaggactgctaagtgtcaaacaagggtgctgcgtgggtgaatgtggtgcctgtacggtgttggtcgacggcacagcaatagacagttgcttataccttgccgcctgggctgaaggaaaagagatccgcacgctggaaggtgaagcgaaaggcggaaaactttctcatgttcagcaggcttatgcgaaatccggcgcagtgcagtgcgggttttgtacgcctggcctgattatggctaccacggcaatgctggcgaaaccacgcgagaagccattaaccattacggaaattcgtcgcggactggcgggaaatctttgtcgctgcacggggtatcagatgattgtaaatacagttctggattgcgagaaaacgaagtaaaaggatatccggcctgaattcaggccggattcactgaggttatgtgtttaacaactcatatttcttaatcttgcgatagagcgtagcaatgccgatgcccagttcatcagcaacttgcttcttgctgttatgacgactaagcgcctcgcggatcatttgcttttccatctcctccagcgccgtgccgcccgcatcatcgagactcaggtgcgcctcactgacctctgttacatcactttgctccgttgtgccattattcagcagatttggcggcaatagcgtgctgtcgataacttcaccactaggaaccacgttaaccagatattccatcaaattgcttaactcgcgcaggtttccgggccaacgatgcttacgcaatatttcgacgacatcgggagcaatgccaggataaacgcttcccagacgacgggtatgcagatgtaaaaagtaatgcaccaatagttcaatatcttcctgacgttcacgcagcggtggcagagttatcgggataacattaagtcggtagaagagatcttcgcggaatttaccttcggcaatgaactgggccaaattctgattagttgcagaaatgatgcgaatgtcgacttgtattgggctactggcaccaatcggcagaatttcacgtgcctcaatagcgcgcagtaatttagcctgcaacattaatggcatatcacctatttcatcgagaaacagcgtgcccgtattcgccgcctgaatcaaccctgttttaccgttggcagaagcgccagtaaatgcacctttaacataaccgaacagttcgctctccagaagctgctccggaatcgcggcacagttgatagcaataaagggtttattccgtcttccgctcaacttatggattgcacgggcgacgacttctttacccgtgccgctttcaccaaccaccataacgctggatgggctgggtgcaatacggctaatgagtcgttttaattgccgcataacacggcactcgccaaccaattgttcaatatgcggttcatcaggtgcatttgctacagaaaaactggtatggctttggtgaaacgccattaaaaataattgtcggccctgaatgttatgcaattgaccaatgattaattcacttttatcgtcccaactaacaatatgctgcatatgtccatgggtaaaattactctcaaatgttaatggtctgaaacggataggtttcccaataatattattttgcacaacaccaagtgtttttaaggcagtctgattaacaaactgaacccgattttcatcatctacaactaatacgccctgatccatattatcgatcatggtcgcaaatattttactgatgttatctcctggcccctgatcctccagaagtttgctaacaaaaatggtggatatatggcgaacataatcagaaaattcgcgtaaattatcactgatatgctcttgttgctcgtgggtaacggcaatcaaacttatcaccccaacacaacgatcctgtaaaatgacaggcgtacccagaaatgctttttcgcggcaattttctttactatcgcaaccttcgcaaaggggatcgaagcgagactgtgtcacaactttttcagttttcgtttccaggacgtggcggagcaggcgactgttgccgctcaactggcgaccaagaaacttcccatacgcgcccgttccggcaacgcgacacaagttttcatcaacgatctcaacctcaagctgcaaaaacgctggcaagcattctggcaaaacgctgaattgtcggttgaatttgcatcaatacactctgcgtagtagcaagctccatagctttaccttccagacttacttaaaagtcgatcattgaagacgttgatggttcacagatcatgatgatattaactcaggcgaaattggctttgataaaaacataagatttttatcattttctaatgaaattatggaagagatatcacatttctatatcaatatgagaattacggcggtgagtttatcaaactgaagagagatagcctgcccctttatcttatttctgatacttagcagcaaataaataacgcgataaaaaaagccaaacgttttcgtattttacaaacaaccagaagctggcatcaatttgtgatcaaccccacacattatccgtcaaattagtcttttgcagccgcgcggataattctggcacacttattgttagtcccaggtatagctgtgaaaacaccaatcactttggcaagtcacagtgaaataaaccactttgcctgtcattccactaccgggactttatgatgaaaactgttaatgagctgattaaggatatcaatagcctgacctctcaccttcacgagaaagattttttgttaacgtgggaacagacgccagatgaactgaaacaagtactggacgttgccgcagcattaaaagcactgcgtgctgaaaacatcagtaccaaagtctttaatagtggattaggtatttccgtattccgcgacaactccacccgtacccgcttctcttatgcttccgcgcttaacctgctcggccttgcacaacaagatctcgacgaaggcaaaagtcaaatcgctcacggcgaaaccgtgcgtgaaaccgccaatatgatctccttctgcgccgacgctattggtattcgcgacgatatgtatctgggcgcaggcaacgcctatatgcgtgaagttggcgctgcacttgatgacggttacaagcagggtgtactgccacagcgtccggctttagtgaacctgcaatgcgatattgaccacccgactcagagtatggctgacctcgcgtggttacgtgaacactttggtagtctggaaaacctgaaaggtaaaaaaatcgccatgacctgggcctactctccaagctatggcaaaccgctctctgtaccacaaggcatcatcggtctgatgactcgcttcggtatggatgtcaccctggcccatccggaaggctacgacctgatcccggatgtggttgaagtggcgaaaaacaatgctaaagcctccggtggtagcttccgtcaggtcaccagcatggaagaagccttcaaagacgcagacatcgtttatccgaagagttgggcaccttacaaagtgatggaagagcgtactgaattgctgcgtgcgaacgatcacgaaggcttaaaagcactggaaaaacagtgtctggcacagaacgcgcaacacaaagactggcattgtactgaagagatgatggaactgacccgtgatggcgaagccctgtacatgcactgcctgccagctgatatcagcggcgtatcctgtaaagaaggtgaagtgactgaaggcgtattcgaaaaataccgtatcgctacctacaaagaagccagctggaagccttatatcatcgccgcgatgatcctgtcccgtaaatacgccaaaccaggtgcactgctcgagcaactgctgaaagaagcgcaagaacgcgtgaaataacccctcgggccgatcagctggtcggccctctatttccagaggccaaaaggataggatatgtccgttttcagtttgaagattgatatcgccgataacaaatttttcaacggcgaaacaagtccgctctttagccaaagccaggccaaactggcgcgccagttccaccagaaaatagctggttatcgcccaacaccgctttgtgcgctggacgatctcgcaaacctttttggtgtgaagaaaattctcgtcaaagacgaaagtaaacgattcggtctgaacgccttcaaaatgcttggcggtgcgtacgccatcgctcaattattgtgtgaaaaatatcatcttgatatcgaaacgctgagttttgagcacctgaaaaatgccatcggcgaaaaaatgactttcgcgaccaccaccgacggcaaccacgggcgcggtgtggcgtgggcagcacagcaactcggacagaatgcggtgatttacatgccgaaaggttctgctcaggaacgcgttgacgccattctgaacctcggtgccgagtgcatcgtcacggatatgaactatgacgataccgttcgcctgaccatgcaacacgcgcagcagcacggctgggaagtggtacaggacacggcatgggaaggttacaccaaaatcccaacctggatcatgcaaggctacgcaaccctggcagatgaagccgtcgagcaaatgcgtgaaatgggcgtaaccccgacgcacgttctgctgcaagccggtgtcggagcaatggccggtggtgtgctgggttatctggtcgacgtctatagcccgcaaaatctgcacagcattattgttgaacctgacaaagctgactgtatttatcgctccggcgtcaaaggcgacatcgtcaacgttggcggtgatatggccaccatcatggcaggcctggcctgtggcgaacctaacccgctgggctgggaaatcctacgtaactgcgccacccaattcatctcctgccaggacagcgttgccgcattaggtatgcgcgtgctgggtaatccgtacggcaacgacccgcgcatcatctccggtgaatccggcgctgtcggtttgggcgttctcgcagcggttcattatcacccgcaacgtcaaagcctgatggaaaaactggcgctgaacaaagatgccgtggtgctggttatcagcactgaaggcgacaccgacgtgaagcactaccgcgaagttgtctgggaaggcaaacacgctgtagcaccttaatcaccctattggaactgctccctgcaaaacggggagtaaaaaatctggagaaaaataatggctaagaatattccattcaaactgattcttgaaaaagcaaaagattaccaggcggatatgactcgcttcctgcgcgacatggttgctattcccagtgaaagctgcgacgagaaacgcgtagtacatcgtattaaagaagagatggaaaaagtcggcttcgataaagttgaaatcgacccgatgggcaacgttctcggttatatcggccacggcccgcgtctggtggcaatggacgctcatatcgataccgtcggcattggcaacatcaaaaactgggacttcgatccgtacgaaggcatggaaactgatgaactgattggtggtcgcggtacttccgaccaggaaggtggcatggcctctatggtttatgccggtaaaatcattaaagacctcggtctggaagatgaatataccctgctggttaccggtacggtgcaggaagaagactgcgacggtctgtgctggcagtacattattgaacaatccggcattcgcccggaatttgtggtcagtaccgaaccaaccgactgccaggtataccgtggtcagcgcggtcgtatggaaattcgtattgatgttcagggtgttagctgccacggttctgcaccagaacgcggtgataacgccattttcaaaatgggtccgattcttggcgaattacaagaactctcccaacgtctgggttatgacgaattcctcggcaaaggcaccctcaccgtttctgaaatcttcttcacatccccaagccgttgcgctgtagcagacagctgcgcagttagtatcgaccgtcgtctgacctggggcgaaacctgggaaggcgcgctggacgaaatccgcgccctgcctgcagtacagaaagctaacgcggttgtttctatgtacaactacgaccgtccgtcctggactggcctggtttacccaaccgaatgctacttcccgacctggaaagtggaagaagatcacttcaccgttaaagcactggtgaatgcctacgaagggctgtttggcaaagcgccggttgttgataagtggaccttcagtactaacggcgtatctatcatgggccgtcacggcattccggtgatcggctttggcccgggtaaagaacctgaagcgcatgcacctaacgaaaaaacctggaaatctcacctggtgacctgtgccgcgatgtacgctgcaatcccgttaagctggctggcaacagagtaattactcttcacttattcccctccggttcgccggagggtttttggagtttgctatgcgcgtattgatcaaaaacggcactgtcgttaacgcagatggacaagccaaacaggatttgctgattgaaagcgggattgttcgccagttgggcaacaatattagcccgcagctcccgtatgaagaaattgatgccactggctgttacgttttccctggcggcgtggatgtccatacgcatttcaatattgatgtcggcatcgcgcgcagttgtgatgatttttttaccggtacccgcgcagctgcgtgtggcggtacaacaaccattattgaccatatgggatttggcccaaacggctgtcggttacgccatcaactggaggtttatcgtggttatgccgcccataaagcggtcatcgattacagctttcacggtgtgatccagcacattaatcacgcaatcctcgacgaaatcccgatgatagtcgaggaaggactgagcagttttaaactctatttaacctatcaatacaaactcaacgatgacgaggttttgcaggcattacgccgcttgcatgaatccggcgcgctgaccaccgtgcacccggaaaatgatgcggctatcgccagcaagcgggcggaatttatcgccgcagggttaaccgcgccgcgctatcatgccttgagtcgccctctggaatgcgaagcggaagccatcgcccgcatgattaacctggcacaaattgccggtaacgccccgctctatatcgtgcacctgtctaacggcttaggtctggattatctgcgtcttgcccgtgcgaatcaccagccagtctgggttgaaacctgcccacaatatctcctgttggacgaacgcagttacgatacagaagatggcatgaagttcattcttagcccaccgctgcgtaacgtacgcgagcaggacaaactgtggtgtggcatcagcgatggtgcgattgacgtggtggcaaccgatcactgcaccttcagcatggctcaacgcctgcaaatttctaaaggcgatttcagtcgctgcccaaatggcttacccggtgtggaaaaccgcatgcagttactgttttccagtggcgtgatgacgggacgtataacaccggaacgctttgttgaattaaccagcgcaatgcccgccaggttgtttggcctgtggccgcaaaaaggattattagcgcccggttccgacggcgacgtggtgattatcgacccacgtcagagccaacaaattcagcatcgccatctccacgacaacgccgactacagcccatgggagggttttacctgtcagggcgcgattgtcagaaccttatcccgtggtgaaacgattttctgtgacggcacctttacaggcaaagccgggcgaggtcgtttcctgcgacgcaaaccgtttgtccctcccgtgctctaaccactgccagggatctatacacaatcaagaatgatgagtgaggaaaaatgagtaagaaaattgttctcgccctgggcgggaatgcgctgggcgatgacctggccgggcaaatgaaagcggtaaaaattacttctcaggcaattgttgatttaattgcccagggacatgaagttatcgtcactcatggtaacgggccgcaggtgggcatgattaaccaggcctttgaagctgccgcaaaaactgaagcgcacagcccaatgctgccgatgtctgtctgtgttgcattaagccagggttatattggttacgatctacaaaacgctttaagagaagaactgctttctcggggcattaataaacctgtagcaacgctggttactcaggtcgaagtcgacgctaacgatccggcattcctcaacccgaccaagccgatcggtagcttctttaccgagcaagaagcagagcaactgacaaaacagggttacactctgaaagaagatgctggtcgcggctatcgccgtgttgttgccagcccaaaaccggttgatatcattgaaaaagaaacggttaaagctctggtagatgcaggtcaggtggtgatcaccgttggcggtggtggtatccctgttattcgtgaaggtaaccatctgcgtggtgccagcgcggttatcgataaagactgggccagcgcccgtttagcagaaatgattgatgccgatatgctgatcattctgactgcggtagaaaaagtggccattaacttcggtaaagagaatgaacagtggctcgatcgcctgagtttaagtgatgctgaacgctttatcgaagaaggtcattttgcgaaaggttctatgctgcctaaagtggaagctgccgccagctttgctcgctctcgcgcaggtcgtgaagcactgattaccgtattgagcaaagcgaaagaagggattgaaggcaaaacaggaacggtgatttgtcagtaatttaaaggccgggtgggtaataccatccggccaaagattgtcaagtaagtgcgctttgttgatgccggatgcggcgcgagcgccttatccgtcctacaaaacatcgcaaattcaatagattgcaatgcacttgtaggcctgataagcgtagcgcatcaggcaatttggcgtttgtcatcagtctcaggccgggtgggtaataccatccggccattttcatttaagccacttccagcacttcttttgtcgctttcacgccctgatgcatcaacatcattaacgcctcaagtacgccgccgccaatcgcccgggctttatcagaaacgctggtgaaatcagcggtttcaccacgaggatcgatatcaccaattttaaaaccaccaaccactgccaggccgtcgttcaacaagccacgcaccatccccgtcaacggtgctttaatttcatgctcaccaatccaggcaatcacatcgccctctttcaccagatcgcctaatttcacgttggatcgcataatgcctgcagcaggagcacggatcacccgtcgggtggtatgccccataatattgccaggaacaccggtattctcctgcgcacaaccagagtaaatcacctgaccgagccagtgcccgcgatttgtttcaattaccgcatgacaatccttcccagcagtaaagcccggcccaagcgcgattgttactggtgccatatctgcccgcgttcccaaattctgtttcgccagaatagcgtccaccacgcaaagcggtttcagttcatcaagcaaactacaggcgggatctaccatcacaggaatgaatccgcgttcggtaagtttcatcgcttccgcagagctggttgccaggcgagcagtgacgccttcgaccgtcatttcgccatcgaacacggcctgggcaaacgccacggtacaacgaatcactgtcggtttttccacttccagcatgatcactttaaaacccgcatgatacagacgtagcgccacaccactggcgatatctcccgcaccgcgaatcaccaccagctggtgtccggaaggatgagaaggtttcatcatcagcccacccggcgcgttatttttcacctgtaatatttctgccagcacgctgatggcgatctcctgcggcgtttccgcacctatgttgtaaccaacgggcgcatgtaaacgggcaatatgttcttcagccacgcctttctcacgcaattgacgcaggaaaagctgaaccttgcgacgacttgccagcaaccccaaccatgcaatgggctgttcaatgagtttgtcgagggcttcacgatcctgattattcgtggcaatcaggacaaaattatcagggcgaatatccagtgcttccactgccgcaccaaagctctcagcatggagaagcgtggtacttggtgggaatagttcaggattgaggctttcgcgataaatatcagcaacggcaatatcaaatcctaatagcgccgcactctgggctatcgcccggttgacatgccccgcgccaatcaacaccagacgtggacgcataccatggacgctgataaatacactcattgcacctccacaatcactcccgacagcatccgcaccgttacgagccatacgtccatggaataatcgcggcttacgttcctgcaatgcctgaaggctctcttcaatcaccttccgctcaaccattccgccaccaattgtaccgacgatagaaccatcggcgcgcactaacatttgtgcagaatggcggggagtgctgcctcggctatcaacaatttgcgccatagcaaacggacaattttgctcttcgagttttgcagcctctgtgaaaatattcataccaacctcaatggatatcctttcagtaacccggaatacccgggccgttaattcacaaatctgcgcgcgattgcaggatgttcttgtatatcgcccagccagattgcctctacgtcgtgttgttgcagcggttgaaggagctcgctttgtgcaatcgcattctcacattgagaaaaacggttaatgaaccagactcgccgacaaccttgcggtacgtttttaaacgccccctgagggtggcgaaccagcgcaacgagatcgctcagttgcaaggttgcatcaggtgttaacccggtaatatcagcaaactggctccagcgatggacattttctgtgctcactttcgcgcccaaagtatgtcctcccatcacagcaatcacgcagcaactgcttttgggtatgcaaggttcgtgctcatcaggcgcttttaacggcattccacggctgccatctgcttcaatgagaattacgtcacactctggtcgttgcaccagtgcatcaatcgcttctggcgtaaatccctgcacttttccctggttcgctttccagctgtgaaaacaaaaactaatgggggatgtaagagacgcatgaggaagcatggcgggatcacgacagaaaaccacgggccagtgagacgttggcataaacatatgtgtcgtcgtcgtgattaacacacgcctgccgctagcctggagcagttctgccagccaaaaaagcaagctggttttccccccagcaccaacaacagaaatcacagtgggacgtttctgcgcacctaaatcaatgactaatgcgcttgggtcaactatacttttcacgagtctttatgacctctctgggataaattatccccaacttaatccatcaggaagtaacgcaattatcaggcgttattagcccctataaataatggaaccactatgagtgccatcgactgtataattaccgctgccggattaagtagtagaatggggcaatggaaaatgatgttaccctgggaacagggaacaattcttgatacaagtatcaaaaatgcgttgcagttttgtagccgaattattttagtcaccggctatcgtggtaatgaactgcacgaacgttatgcgaaccagagcaatatcactattattcacaacccagattatgcgcagggtttactaacatccgtcaaggccgcagtacccgcagtgcaaacagaacattgttttctcacccacggtgacatgccaaccctcaccatcgatatttttagaaaaatctggagcttacgaaatgatggcgcaatactgccactccataatggcatccccggccatccgattttagtgagtaaaccatgcctgatgcaggcaatccaacgacccaatgtcaccaatatgcgtcaggcactccttatgggagatcattattccgtcgaaatagaaaatgcagaaataattttagatattgatactccggacgactttattacagcgaaggaaaggtatactgaaatttaaaaaacgtagttaaacgattgcgttcaaatatttaatccttccggcactcattatcataatgataaggaatcactgattttgagaaaagagaaaaattgataaatgggctggcaataataattttcaggagtgattttaattctcatttagcacctgtgagttcattcacaaaaagcccttaagtttcgagccgcctcacatttttttatatttcccgccaaacctggcaagagtggtgcgattgttgctctatccccctaaaccaccggatttctcaacaccggtcactcaatgatatctgtataagctaaggagagggttatgggggatattatgcgtcccattccgtttgaggaacttttgacgcgcatatttgatgaataccaacaacaacgcagtatctttggtattcccgagcaacagttttacagtcctgtaaaaggtaaaactgttagcgtcttcggtgaaacctgtgccactcccgtcggccctgccgctggcccgcacacgcagctcgcgcaaaatattgtcacttcctggctgactggcggacgcttcatcgaactaaaaaccgtccaaattcttgaccgcctggagctggaaaagccctgtatcgatgccgaagacgagtgctttaacaccgaatggtctaccgagtttaccctgcttaaagcctgggatgaatacctcaaagcctggtttgccctgcaccttctcgaagcgatgttccagccttctgattccggtaaaagcttcatctttaatatgagcgtcggttacaacctcgaaggtattaagcaaccgccgatgcaacagttcatcgacaatatgatggacgcatctgaccatccgaaattcgctcaatatcgcgatacgctgaataaattactccaggatgacgcatttttagctcgccacggattgcaggaaaaacgcgaaagcttgcaagccttacccgctcgcatccccaccagtatggtgcatggcgtcaccctctccaccatgcacggctgtcctccgcatgaaatcgaagccatttgccgctacatgctggaagaaaaagggctcaacacctttgtgaaacttaacccgaccttactggggtacgcgcgtgttcgtgagatcctcgatgtctgcggtttcggttacataggcttaaaagaagagagttttgatcacgacctcaagctgacgcaagcactggaaatgctggaacgcctgatggcactggcaaaagaaaaaagtctcggctttggcgtaaaactgactaacactctcggcaccatcaacaataaaggcgcactgcctggtgaagagatgtatatgagtggccgtgcgctgttcccgctctccatcaatgttgcagcagttctctctcgcgcctttgacggcaaactgcccatttcttattccggtggtgccagtcagctgactatccgcgatatttttgatacaggtattcgccctattactatggcaaccgacctgctgaaacctggcggctatctgcgcttaagtgcctgcatgcgcgagctggaaggctccgacgcctggggacttgaccatgttgacgtcgaacgactgaacagactggcagcagatgcgttaaccatggaatacacccagaaacactggaagccagaagagcgtattgaagtggcagaagacctgccgctgaccgactgctacgttgccccctgtgttactgcctgcgctatcaagcaagatattccggaatacatccgtctgcttggcgaacaccgctatgccgacgcgctggaactcatctaccaacgcaacgctctgcccgccattaccggtcatatttgcgatcaccagtgccaatacaactgtacccgcctggattacgacagtgcgctgaatatccgcgaactgaaaaaagtcgcgctggaaaaaggttgggatgaatataagcaacgctggcacaaaccagccggttctggtagtcgccatccggttgccgtgattggtgcaggtccggcgggtctggcagcaggttacttccttgccagagcgggccatccggttacgctgtttgaacgcgaagccaatgcgggcggcgtggtgaaaaatatcattcctcagttccgtattcctgcagagttaattcagcacgatatcgattttgttgccgctcacggcgtgaaatttgagtatggctgcagtcccgatttaaccattgagcagttaaaaaatcagggcttccactatgttctgattgccaccggcactgataaaaatagcggtgtgaaactggcgggcgacaaccaaaatgtctggaaaagtctccccttcctgcgtgaatacaacaagggtacagcgctcaagctgggcaaacatgtggtcgttgtcggggcgggtaacaccgcaatggactgcgctcgtgcggcgttacgcgttccaggcgtagaaaaagcaacgatcgtttaccgtcgtagtctacaagagatgcccgcatggcgcgaagagtatgaagaagcgttgcacgacggcgtagagttccgtttcctgaataatccggaacgtttcgatgctgatggcaccttaaccttgcgcgttatgagccttggcgaaccggatgagaaaggtcgtcgtcgtccggttgaaaccaatgaaacagtaacactgcttgtagacagcctgatcaccgccattggtgaacagcaggatactgaagccctgaatgcgatgggcgtgccgctggacaaaaacggctggccagacgtcgaccataatggcgaaactcgtctgactgacgtctttatgatcggcgacgtacagcgcggaccatcctccattgtcgctgctgtcggaaccgcgcgtcgggcgaccgatgccatccttagtcgggaaaatatccgttcccaccagaacgataaatactggaacaacgtcaatccagcggaaatctatcaacgtaaaggcgatatctctatcacgctggtgaacagtgacgatcgtgacgcgtttgtcgcccaggaagccgctcgctgcctcgaatgtaactacgtttgcagcaagtgtgtggatgtctgcccgaaccgcgccaacgtctccattgcggtcccaggcttccagaaccgtttccagacgctgcacctcgacgcttactgtaacgaatgcggcaactgcgctcagttctgtccgtggaacggtaaaccgtacaaagacaaaatcaccgtcttcagcctggcgcaagactttgataacagcagcaacccaggcttccttgtggaagattgccgggtacgagtacgtctgaataaccaaagctgggtgttaaacatcgacagcaaaggtcagtttaacaacgtaccaccggagctgaacgatatgtgccgcatcatcagccatgtccaccagcatcatcattatctgctgggccgcgtggaggtgtaatcatgttgattctgaagaatgtcactgcggtacagctacacccggcaaaagtgcaggaaggcgttgatatcgccatcgaaaacgatgtgattgtcgctatcggcgatgccctgacgcaacgctaccccgacgccagcttcaaagagatgcatggccggattgtgatgccagggattgtctgcagccacaaccatttttacagcgggctttcccgcggaattatggcaaacatcgcccctttgcccggatttcatcagtacgctgaaaaatctctggtggcggctcgatcgcgcccttgatgaagagagcctctattacagcggactgatttgttccctggaagcgattaagagcggatgtacaagcgttatcgatcaccatgcctctccggcgtatatcggcgggagactctccacattgcgcgacgcatttttaaaagttggcctgcgcgcgatgacctgttttgaaactactgaccgtaacaacggcatcaaagagttgcaggaaggtgtagaagaaaacatccgtttcgcccgtttgattgatgaggcgaagaaagcgacaagcgagccgtatctggtggaagcacatatcggtgctcacgcgccgtttaccgtgccggatgccggtctggagatgctgcgtgaagccgtgaaagccacaggccgtggtttgcatattcacgctgcggaagacctttacgacgtttcctacagtcaccactggtacggcaaagacctgctggcacgactggcgcaattcgatctcatcgacagcaaaacgctggtcgctcatgggctgtacttgagcaaagatgacatcaccctactcaatcagcgcgatgcgttcctggtgcataacgcccgtagtaacatgaacaaccatgtcggctacaaccatcaccttagcgacatccgcaatctggcgttgggaacggacggcattggtagcgacatgtttgaagagatgaaatttgccttctttaaacatcgcgatgcgggtggtccgctgtggcctgacagttttgccaaagccctgactaacggtaacgaactgatgagccgcaactttggcgcgaaatttgggcttctggaagccggttacaaagctgatttaaccatttgcgattacaacagcccgacgccgctgctggcagacaatatcgccgggcatatcgctttcggtatgggcagtggcagcgttcacagcgtgatggtcaatggtgtgatggtctatgaagaccgtcagtttaacttcgattgcgattccatttatgcacaagccagaaaagccgctgccagtatgtggcgtcggatggatgcgctggcataaatgacagatgccctcttcccgcagggaagagggttaaataaggaaagaagatgattgaacaatttttcaggcccgactctgtcgaacaggcgctggaactgaagcgccgctaccaggatgaagccgtctggttcgccgggggcagcaaactcaatgctacaccaacccgtaccgataaaaagattgccatttccttacaggatctggaactggactgggttgactgggataacggtgcactgcggattggcgcaatgtctcgcttgcagccactgcgtgatgcgcgatttattcctgcagcgctgcgtgaagccctcggttttgtttacagtcgccatgttcgtaatcagagcaccattggtggtgaaatcgccgcccgccaggaagagagcgtgctgcttcccgtcctgttggcactggatgctgaactggtttttggcaacggcgaaacgctgagtatcgaggactacctggcctgcccatgcgatcgcctgctaaccgaaattatcattaaagatccgtatcgcacctgtgcgacccgcaaaattagccgttctcaggcaggtttaaccgtcgtgacggcagccgttgcaatgacagaccacgacggtatgcgaattgcgctggatggcgtcgccagtaaagcactgcgtctgcatgatgtcgaaaaacaaaatctggaaggcaatgcacttgaacaggctgtcgccaacgccattttcccgcaggaagatttgcggggcagcgtggcctataaacgctatatcacgggagttctggtagccgacctgtatgccgactgccaacaggctggggaggaagccgtatgatcatccactttactttaaatggcgcgcctcaggagctaaccgttaatccaggcgaaaacgtgcaaaagctgttgtttaacatgggaatgcactctgtacgcaacagtgatgatggtttcgggtttgccggttctgacgcaataatctttaacggtaatatcgttaacgcgtccttgcttattgccgcacagttagagaaggcagatattcgtaccgcagaatctctgggcaaatggaacgagttaagtctggttcaacaggcaatggttgatgttggcgtggtgcagtctggttataacgatccagctgcagctctgattatcaccgatcttctcgatcgcatcgccgcacctacccgcgaagagatcgacgacgcgctttctggtttgttcagccgcgatgctggctggcagcaatactatcaggtcattgaactggcggttgcacgtaaaaataatccgcaggccaccattgatatcgctccgactttccgtgacgacctagaagtcattggtaagcattatcctaaaactgatgccgcgaaaatggtgcaggcgaaaccctgctatgttgaagaccgcgtaacggctgacgcctgcgtcattaaaatgttacgtagcccacacgctcacgcactgattactcatctggatgtcagcaaagctgaagccttaccgggcgtcgttcacgttattactcacctgaattgcccggatatctactataccccgggtggtcagagcgcaccggaaccgagtccgcttgaccgccgtatgttcggcaagaaaatgcgtcacgtcggcgatcgtgttgctgcggtcgtcgcagaaagtgaagaaattgcgctcgaagcactgaagctcatcgacgttgaatatgaagtgcttaagccggtaatgagcatcgacgaagcaatggcggaagatgcgcctgtcgtgcacgatgaaccggtggtgtatgttgctggtgcgccagatactctggaagacgataacagccatgcagcccagcgcggcgagcatatgatcatcaacttcccgatcggttctcgccctcgcaaaaatatcgccgccagtattcatggtcatattggcgatatggacaaaggctttgccgatgccgatgtgatcattgagcgaacctataacagtacgcaagcgcagcagtgcccgactgaaacacatatctgctttactcgtatggacggcgatcgtctggttatccacgcctccacccaggtaccatggcacttacgccgccaggtcgcgcgcctcgtgggcatgaaacagcataaagttcatgtcattaaagagcgagttggcggcggttttggttccaaacaggacatcctgctggaagaagtgtgcgcctgggcaacctgcgtgaccgggcgtccggtactgttccgctacacccgtgaagaagagtttattgctaacacctctcgtcacgtcgcgaaagtcaccgtcaaactgggagcgaaaaaagatggtcgcctgacggcagtgaagatggatttccgcgccaacactggcccttacggcaaccacagtctcaccgtaccgtgtaacggaccggcgctgagcctgccgttatatccgtgcgataacgtcgatttccaggtcaccacctactacagcaacatttgcccaaatggtgcttatcagggttatggcgcaccgaaaggtaacttcgctatcaccatggcattagcggaactggctgaacagttacagatcgaccaactggaaattatcgaacgtaaccgggtacacgaagggcaagagctgaaaattctcggtgcaatcggtgaaggtaaagcgccgacctccgttccttccgccgccagctgtgcactggaagagatcctgcgtcagggtcgcgagatgatccaatggagcagtccgaaaccgcaaaatggtgactggcacatcggtcgcggcgtcgccattatcatgcagaaaagcggtatcccggatatcgatcaggctaactgcatgatcaaactggaaagcgacggcacctttatcgttcattctggcggtgcggatattggtactggtctggatactgtagtgacgaaactggcagcagaagtgctgcactgcccaccgcaggacgtgcatgttatctccggtgataccgatcatgcgttgtttgataaaggcgcatatgccagctccggtacttgcttcagcggtaacgcggcgcgtttggcagcggaaaatctacgggagaaaattctgttccacggcgcgcaaatgttgggtgagccagtggcagatgttcaactggcaacgccgggcgtcgtgcgcggcaagaaaggcgaagttagtttcggggatattgcccataaaggcgaaaccggcaccggctttggtagtctggtgggaactggcagttatatcacgcctgatttcgccttcccgtatggcgcaaacttcgctgaagttgccgtcaacacgcgtacgggtgaaatccgcctggataaattctacgccttgctggactgcggtacaccggtcaatccagagttagcgttgggacaaatctacggtgccaccctgcgtgctatcggccacagtatgagcgaagagatcatttatgacgccgaaggtcacccgttaacgcgtgatttacgcagttacggcgcaccgaaaattggtgacattccgcgtgatttccgcgctgtgctggtgccgagcgacgataaagtcggcccgttcggggcgaaaagcatcagcgaaatcggtgtaaatggcgcagctccggcgattgctaccgcaattcacgatgcatgcggcatctggttacgcgaatggcatttcacaccggagaaaatactcactgcgctggaaaaaatataaataataaatggccgcttcggcggcctgtttctctgtttgaacgatgactaaatagtgactgcgaaaatgagataagccgttctcaaggcgtcctgcgccccaaattcgtgggaatttattttactaattcagatgatcaaatttactttaaaaggagtgaagggatgtctgatataaaccatgcaggttctgaccttatatttgaactggaggatcgccctccctttcatcaggctctcgttggtgccattacccatctgttggcaattttcgttccgatggtaacccccgcgttaatcgtgggtgcggccttacagctttccgctgaaacaactgcctatcttgtttctatggcgatgatcgcctctggtattggtacctggttacaagtaaaccgctacggcatcgtcggttctggcctactcagtattcagagtgtcaattttagttttgttacggtcatgattgcgctgggcagcagcatgaaaagcgacggttttcacgaagagttaatcatgagcagccttctcggcgtctccttcgttggcgcatttctggttgtcggatctagttttatcttgccctatttacgtcgggttattacgcctaccgtcagcggtattgtggtactgatgatcggcttaagcctgattaaagtcggcattatcgattttggtggaggatttgcagccaaaagcagcggtacgttcggcaattacgaacatctcggcgttggtttattggttttaattgtggtgatcggctttaactgctgtcgcagtccgttgctacgcatgggagggatcgccattgggctatgtgtcggctatatcgcaagcttatgcctgggcatggtggatttcagcagtatgcgcaatttgccgttaatcaccatcccgcatccgttcaaatacggctttagttttagcttccatcagttcctggtggttggcacgatttatctgcttagcgtgctggaagcagtcggcgatatcaccgccacggcaatggtttcccgccgccccattcagggggaagagtatcagtcccggctgaaaggcggcgtgctggcagatggtctggtttctgttatcgcctccgctgtcggtagtttaccattaaccacgtttgcgcaaaataatggggttattcagatgactggcgtcgctagtcgttatgtcgggcgaaccatcgcggtaatgctggttatcctcggcttatttccgatgattggcggcttcttcacgaccattcccagcgcagttctgggaggcgcaatgacgttgatgttttccatgattgccatcgcagggattcgcatcatcatcaccaacggtttaaagcgccgtgaaacacttattgtcgccacttctttaggtttagggcttggcgtctcctacgatcccgaaatttttaaaatattgccagcctctatttatgtattagttgaaaaccctatttgtgctggcgggttaactgcgattttattaaatattatcctccctggtggctaccgacaggaaaacgttctgcctggtattaccagtgcggaagagatggattaacagtaaaggagtcaatgatgagtggagaacacacgttaaaagcggtacgaggcagttttattgatgtcacccgtacgatcgataacccggaagagattgcctctgcgctgcggtttattgaggatggtttattactcattaaacagggaaaagtggaatggtttggcgaatgggaaaacggaaagcatcaaattcctgacaccattcgcgtgcgcgactatcgcggcaaactgatagtaccgggctttgtcgatacacatatccattatccgcaaagtgaaatggtgggggcctatggtgagcaattgctggagtggttgaataaacacaccttccctactgaacgtcgttatgaggatttagagtacgcccgcgaaatgagcgcgttcttcatcaagcagcttttacgtaacggaaccaccacggcgctggtgtttggcactgttcatccgcaatctgttgatgcgctgtttgaagccgccagtcatatcaatatgcgtatgattgccggtaaggtgatgatggaccgcaacgcaccggattatctgctcgacactgccgaaagcagctatcaccaaagcaaagaactgatcgaacgctggcacaaaaatggtcgtctgctatatgcgattacgccacgcttcgccccgaccagttctcctgaacagatggcgatggcgcaacgcctgaaagaagaatatccggatacgtgggtacatacccatctctgtgaaaacaaagatgaaattgcctgggtgaaaagcctttatcctgaccatgatggttatctggatgtttaccatcagtacggcctgaccggtaaaaactgtgtctttgctcactgcgtccatctcgaagaaaaagagtgggatcgtctcagcgaaaccaaatccagcattgctttctgtccgacctccaacctttacctcggcagcggcttattcaacttgaaaaaagcatggcagaagaaagttaaagtgggcatgggaacggatatcggtgccggaaccactttcaacatgctgcaaacgctgaacgaagcctacaaagtattgcaattacaaggctatcgcctcagcgcatatgaagcgttttacctggccacgctcggcggagcgaaatctctgggccttgacgatttgattggcaactttttacctggcaaagaggctgatttcgtggtgatggaacccaccgccactccgctacagcagctgcgctatgacaactctgtttctttagtcgacaaattgttcgtgatgatgacgttgggcgatgaccgtagcatctaccgcacctacgttgatggtcgtctggtgtacgaacgcaactaataataaaactttaacatcctcgtgaggacatcattatgtctggagacatcctacaaacaccggacgcaccaaagccacagggcgcgctggataattattttaaaattaccgctcgtggcagtaccgttcgtcaggaagtactggctggcttaacgacctttctggccatggtttattccgttatcgtcgttccgggaatgctgggcaaagcaggttttcctcccgcagctgtgtttgttgccacctgtctggtcgcgggcttcggcagcttgctgatgggattatgggctaatttgccaatggcgattggttgcgcgatttccttgacggcgtttaccgcattcagtctggtactcgggcaacaaattagcgttcctgtcgcactgggcgcggtatttctgatgggcgtcatcttcaccgccatttccgtaaccggtgtgcgtacctggatcttacgtaatttgccgatgggtatcgctcacggtacaggtatcggtatcgggctgtttctgctgctgattgctgctaacggtgtgggtatggttatcaaaaacccgattgaaggcttgccagtggcgctcggtgcgtttacctccttcccggtgatgatgagcttgctggggctggcggtcatcttcggcctggagaagtgtcgcgtacccggcgggatcttgttggtgattattgcaattagcatcatcggcttaatctttgacccagcggtgaaataccacggtctggtggcgatgccaagcctgactggcgaagatggtaagtctctgattttcagcctcgatattatgggtgcactccagccaactgtacttccgagtgtactggcattggtgatgaccgcagtgttcgacgctactggcaccatccgtgccgtcgccggtcaggcgaatttgttggataaagacaaccagatcatcaacggcggcaaagccctgaccagtgacagtgtaagtagtatattctccggcctggtgggcgcagcgcccgcagcggtttatatcgaaagtgcggcaggaaccgccgccgggggtaaaacaggtttaaccgcaaccgtagtgggggcgttattcctgttaattctgtttttaagtccgctgagttttttgatccctggttacgccactgcacccgctctgatgtacgtaggtttgctgatgttaagtaacgtcagcaagctggatttcaatgattttattgacgctatggctggcctggtgtgtgccgtgttcatcgttctgacttgtaatatcgttaccggtattatgctgggctttgtgacactggtcgtaggccgcgtctttgcacgcgaatggcaaaagctgaatattggtacggtgatcattactgccgcactggtcgcattttacgcgggtggttgggcaatctaatagattctccgcgcctttcagcgcggagatttctttcagagaggattctcaccgctggcaacaatacgctgctggcggactcgcctgagttctctttcagtaagcaactgcagcgcctgtgttgggcaagattcaacgcaggctggcccctcttcccgctgttcacagagatcgcatttcacaatttgttgtcgggtatcccccggcaagctctgaatggtgatcattccaaacgggcacgcactgacgcaactctgacagccaatacaacgggcagaattggtctgcaccacctgctcgcccatcgtcagcgcccccacggggcaagcgccaacacaaggggcgttttcacactgatggcacatcaccggcgcactgatgctgtccagtcgctgtaccttcagccggggtaaaaagacatcggcattcaactcctgttcactagggtgagcgaccacacaggctacttcacaagtacggcagccaatacagtcagccggattaacgataattaagcttttcatcagcttgccttcgtatcaaacagagttaacatatcgcgcgccgcctgccttcctgcggccattgcagtgacaaccagatccgcgccatgaactgcatcaccaccagcaaagacttttttcagatgcgtctgggtaggtaaatacccgacgtcaccggtttgaatcaggccccatttatcgagtttaattccgctgccctgcaaccacggcatggcatgcgcctggaaaccaaaggccataatcagaacatcggcgggcaattcaaactcactacccgctaccggacgaggacgacggcgaccatccggccccggctcacccatggcggtacgaatcaggcccaccgcagttaaacgcccatcttcgtcacaagcgatatattgcggttgaacattgaactgaaactcgacaccttcctcgcgcgcattaaccacctctttgcggctgcccggcatactgacttcatcacgacgatacgcgcaggtcacgctggcggcattgaggcggatggaagtccgcaaacaatccattgtcgtatcgccaccgcccaataccacgactcgcttaccttccacgtccgtcagcggatactcttcagactccggcaatcccatgagctggcgggtatgggcagtcaggaacggtagagcctgaatgacaccgggcgcatcttcatgcggcagatctgctcgcatcatcccgtaagtccccacgccgatgaaaactgcatcatattcagaagttaaatcgctaaaggtaatatcgcggccaatttcacagttaagatgaaagtcgattcccattgcggtgaatatctctcgccgctggcttaataccgttttatcgagtttgaaaggaggaatgccaaaagtcagcataccgccaatttctggatggcgatcaaagacatcgacctgaactcctgcgcgcgccagaatatcagcacaccctaaccctgcaggcccagcgccaatcaccgccactttttcgctacggggaacaactttgctgacatcgggacgccagcccatcgccagcgcggtatcggtgatgtagcgttccagattaccgatagagactgcgccgctgtgatctttcaaagtacatgcgccttcacaaagacggtcctgtggacataccctgccgcaaatttctggtaaggaactggtctggtggcaaagttctgccgcttcaataatctttccttcctgtaccagacggatgtaatccggaatagcgttatgcagcgggcaatgccagttgcagttagctttttcggcacaataaacacagcggtcactctcataagtcgcttgttgtggatccagcccgcaatatatttcgccaaagtgggttttccgttcactcgcactaattttatctgcgcctttacggctgttaacggggagcaacgctgcactgcgagatggctgagcgtcactactcgcttttcctgctgccgttttgcgctggcgggccacctttatctgctgcaaccctttatcgtccatcagtcgtaacgcctgtgttgggcaaacttcaatacaggcttgcgtgccggaactgcgctggttacaaaggtcgcatttctgcgcaatcgtatcgaccatctcaacgacgccaaaggggcaagcgattgcgcatcttttacaaccaatacatttttgctcgtccagttgtacgctatcggactggaaagtcagagcattaaccggacaagccgtaacgcaaggggcattgttgcagtgatggcaggccaccggattcgcagcctggcctttccctacaacgtggatacgcggtcgaaagtcactgtgactcagcggccagttttcttgattgtgtgccaccgcacaggcaatttcacaagcatgacagcctatacattccgcagcttcagcagcaataaacttattcatttgcatccctttcatttaatgagttatgtcttctcaaatttcgcgatgcaataaacgggcatatattaggtagcatgaccgttttaattataattttgcgactgagttcaaattattgcccctcaatctatgccgctttcattatttcaacattgccgatcaaaagagcgctatccagataaaaacgattaaatgcgagagtgcgacatgccagaatgattaatgaaatatcaatatgagaaaattacagataattccattgtcaggttctcttctcattttcgtggtttaaccacgattatgtgattgcctccgcaattcctgtctctaactccccttcctcgcaaaaactggcactccacgagcatgtgtttagacagtttcattaacgtaaacggttgctttttactctggcgggcgaaaggagaaacactgatgagcgccatagattcccaacttcccagttcttctgggcaagaccgcccaactgatgaggttgaccgcatattaagtccaggaaagctgatcatactcggtctgcaacacgtccttgtcatgtacgcaggtgcagtcgctgttcctcttatgattggtgaccgactgggcctcagtaaagaagctattgcgatgctcattagcagcgatctcttttgctgcgggatcgtcacattattgcaatgtatcggtatcggccgctttatggggatccgcctgccggtgattatgagcgtgacctttgctgctgtaacaccaatgatagccattgggatgaacccggatatcggcctgctggggatatttggtgccactatcgccgcgggttttatcaccacattattagcgccacttatcggtcgcttgatgcctttattcccgccactggttaccggtgtggttattacttctatcgggcttagcatcattcaggtgggtattgactgggccgccggaggtaaagggaatccgcaatatggtaatcccgtttatttaggtatctcctttgccgtcttaatttttatcttgctcattactcgctatgcgaaaggatttatgtccaacgtcgccgtattactggggattgtatttggctttttacttagctggatgatgaatgaagtcaatttatccgggctacatgatgctagttggtttgcgattgttacgccgatgagctttggtatgccgattttcgatcccgtttccattctgaccatgactgccgtgttaatcatcgtgtttatcgagagtatggggatgttcctggcactgggtgaaatagtcggtcgtaaactctctagccacgatattattcgcgggctgcgtgtcgatggcgtagggacaatgataggcggcacgtttaacagcttcccccacacgagtttttctcaaaacgttggcctggttagcgtgacgcgcgttcatagccgctgggtgtgtatttctagcggaattatattaatcctgtttggcatggtgccaaaaatggcggtgctggtagcctccattccgcaatttgtgctgggcggcgctggtctagtgatgttcggcatggtactggcgacagggattcgaattctgagccgctgtaactacaccaccaaccgttacaacctctatattgtggcgatcagtctcggcgttggcatgactccgacgctctctcacgatttcttttctaagttaccggccgtactgcaaccgctgctacatagcggcattatgctcgcaacccttagcgccgttgtgctgaacgtcttctttaatggctatcagcatcatgctgacctggtgaaggaatccgtctctgataaagatttaaaagtcaggacagtacgtatgtggcttctgatgcgcaagctgaagaaaaatgagcatggagaataatatgaattttttaatgcgcgctatattcagtctgttgttgctttttactctctctattcctgtcatttctgactgtgttgcaatggccattgaaagtcgcttcaaatatatgatgctacttttttaaatggtttttacctgtcggcatccgctcaaaacgggcggttgtcgataaacgctcacttggttaatcatttcactcttcaattatctataatgatgagtgatcagaattacatgtgagaaattatgcaaacggaacacgtcattttattgaatgcacagggagttcccacgggtacgctggaaaagtatgccgcacacacggcagacacccgcttacatctcgcgttctccagttggctgtttaatgccaaaggacaattattagttacccgccgcgcactgagcaaaaaagcatggcctggcgtgtggactaacagcgtttgtgggcacccacaactgggagaaagcaacgaagacgcagtgatccgccgttgccgttatgagcttggcgtggaaattacgcctcctgaatctatctatcctgactttcgctaccgcgccaccgatccgagtggcattgtggaaaatgaagtgtgtccggtatttgccgcacgcaccactagtgcgttacagatcaatgatgatgaagtgatggattatcaatggtgtgatttagcagatgtattacacggtattgatgccacgccgtgggcgttcagtccgtggatggtgatgcaggcgacaaatcgcgaagccagaaaacgattatctgcatttacccagcttaaataaaaaaaccccgacatttgccggggttgtgagcataacgtaatgcttattttaccggacgcatcgccgggaacagaataacgtcgcggatggtatggctgttggtgaacagcattaccatacggtcgataccaattcccagacctgctgtcggcggtaagccatgttccagtgcggtgacgtaatcttcatcgtagaacatcgcttcgtcgtcacctgcgtctttcgcggcaacctgatccaggaagcgttgcgcctgatcttccgcgtcattcagctcgctaaagccgttaccgatttcacgaccaccaatgaagaactcaaagcggtctgtgatttccgggttaacgtcgttacgacgcgccagcggagaaacttctgccggatattcagtaatgaaggtcggctgaatcagatgtgcttctgccacttcttcgaagatctcggtaacgatacggcccagaccccagctcttctcaacgtggatgccgatagattcagcaattgctttcgcagagtcgaagttgtccagatccgccatgtcggtttccgggcgatatttcttgatcgcttcacgcatggtcagtttttcgaacggtttaccgaagtccagcgtcacgtcgccgtaggtcacttccgtcttaccgagaatatcctgtgccagagtacggaacaggctttcggtcagctcgatcagatctttgtaatctgcgtaagccatgtagagttccatcatggtgaactctgggttatgacgtacggaaataccttcgttacggaagttacggttgatttcgaatacacgctcgaagccaccaaccaccagacgcttgaggtacagttccggcgcgatacgcaggtacatgtcgagatccagcgcgttatggtgggtgataaacggacgcgcagcggcaccgccagggatcacctgcatcatcggcgtttcaacttccataaagccgcggttcaccatgaactggcgaataccagagaggatctggctgcgcactttaaaggtgttgcgggattcatcgttggagatgagatcgagataacgctgacgatagcgcgcttcctgatcctgcaagccgtggaatttatccggcagcggacgcagtgctttggtcagcagacgcaactcggtgcagtggatagacagttcgccggttttggttttgaacagcttacctttcgcgccgaggatgtcgccgaggtcccattttttgaactgctcgttataaacgccttccgggagatcgtcacgggcaacgtacagctgaatgcgaccgccaacgtcctgcagggtaacgaaagacgctttacccataatacgacgggtcatcatgcggccagcaacggcgacttcgatgttcagcgcttccagttcttcgttctctttgccgtcgaattctgcgtgcaattggtcagaggtatgatcgcgacggaaatcgttcgggaaggcaatcccctgctcgcgcaggttcgccagcttctcacgacgcgttttcagttcattgttaagatcgactaccgcgtcagcgccctgtgcgtgttgttcagacatgttggttcctcataaccctgctttcaaacttgcttcgataaattgatccaggctgccgtccagcacggcctgcgtgttgcgggtttctaccccggtgcgcagatctttaatgcgggagtcatcaaggacataagaacgaatctggctgccccagccgatgtcggatttgttatcttccatcgcctgtttctcggcatttttcttctgcatctccagttcataaagcttcgctttcatctgcttcatggcctgatctttgttcttgtgctgggaacggtcgttctggcactgggtcacgatcccggtcgggatgtgggtaatacgcaccgcagattcggtacggttaacgtgctgaccgcccgcgccggacgtgcgataaacgtcaatgcgcagatccgccgggttgatttcgatatcaatatcatcatcaacttccggataaacaaacgcggagctgaagctcgtgtggcgacgaccgccggagtcaaacgggcttttacgcaccaggcggtgaacgccggtttctgtacgcagccagccgtaagcgtaatcgccggagattttgatcgtcacggatttaatacccgccacttcaccttcgctctcttcgatgatttcagttttgaaaccacggctttctgcccagcgcagatacatacgctcaagcatgctcgcccagtcctgtgcttccgtaccgccagaccccgcctgaatatcgaggtagcagtcggcgctgtcatattcgccagagaacatacggcggaactcaagctgcgccagtttttcttccagggcgtcgagttcagcaacggcttcgttaaaggtttcttcgtcgtcagcttctacagccagttccagcagaccagaaacatcttccagcccctgtttcatttggtcgagggtgtcgacaacggcttcgagggaggaacgctctttacccagcgcctgtgcgcgttcgggttcgttccagacatccggctgttccagctcggcgtttacttcttccagacgctctttcttggcgtcgtagtcaaagataccccctaagaacgtcggagcgttccgtgaggtcctgaatgcgattatttaccggattaatttcaaacatggtctgatttcttttattgagctagtcaaaatgcggtgataagagcgggattgtacccaatccacgctcttttttatagagaagatgacgttaaattggccagatattgtcgatgataatttgcaggctgcggttgccgcgaaactcgttgatatcgagcttataagccagttgcacttcgcgcacgccgttatccggccagagggcggtatcgacattaaaagcaataccatccagcagtggaccgccgccgaccggttcgaccatcaccttcaaatgacgttcgcccaccagccgctgttgcagcagacggaaatgaccgtcaaacagcggctccgggaacatctgcccccacgggccagcatcgcgcagcagctgcgccacttccatggtcatttcggccgggcttaacggaccgtcacttaccacttcgccttgcaataggctagggtccagccactcagtaaccagttcgccaaaccgttgttgaaagagtttgaatttatcctcttccaggctcaaacccgccgccatcgcatgaccgccaaacttcagcatcatgccagggtagagtgtgtctaatcgctccagcgcatcacgcatatgcagcccctgaatggagcgaccggaacctttcagcgtaccgtcacctgctggcgcaaacgcgataaccggacggtgaaaacgctctttgatgcggctagccagaataccgacaacgccctgatgccattcggggtgatacattgccagcccgccgggtagcgtgtcacggctgcgctccagtttctcgcacagggtcagggcttcaatttgcattccttgttcgatctcttttcgcgtctggtttagcgcatcgagttcatttgccagcacgcgcgcttcgccgatgttgtcgcacaacaacagcgccacaccgacggacatatcgtccagtcgtccggcagcattgagacgtggccccagcgcaaaacctaaatcgctggcggcgagtttttgtgcatcacggtttgccacttcaagcagcgctttaatccccggacggcactttccggctcggatgcgactcatcccctgccaggtcagaatgcgattattagcgtccagcggcacgacgtccgccactgtccccagcgcgaccagatccagcagttctgccaggttaggaattgcgatgttacgctcatcaaaccagccctgatcgcgcaaaaaggtgcgcagcgccagcatcagataaaacgccacacccacgcctgccagacttttgctcgggaaattacagtcgcgcaagttagggttaatgatcgcttccgctgcgggtaatgtgtcgcctggcaaatggtgatcggtaacaataaccgggatgcccaagctgcgagcgtgctcaacccccgcatgggaggaaataccgttatccaccgtgacaattaactgcgcgccacgggcatgggcctgatcgaccacttccgggcttaagccgtaaccgtcttcgaaacggtttggtaccaggtagtcgatattgctgcaaccaaggctgcgcatcgccagcacgcttagagccgtgctggtcgcgccgtcggcgtcgaaatcaccgaccacaataatccgcgttccttcgcgaaaagcgttgtaaaggatctcaacggccttttcgacgccgctcagttgctgccagggcagcatacctttaacactgcgttccagttcttgcgcactgcgtactccccggctggcgtataaacggcgcagcaagggaggcaattcagcgggcaagtctgccgtttcatcgacttcacggcgacgaagttgtatctgttgtttcacgcgaattatttaccgctggtcattttttggtgttcgtcgaggaattctttcatctctttcggcggctggtaacccggaacaagtgtgccattgctcagcacaactgccggagtaccgctaacgccaagctggacgccaagtgcgtaatggtcggcaatatccacgtcgcaactggctggtgcgacgcttttacctgccatcacatcatcaaacgctttgtttttatctttcgcacaccagatagctttcatttctttctctgcatcgctgtccagcccctggcgcgggaaagcaagataacgcacggtgatccccagcgcgttgtagtctgccatttgctcatgcagtttgtggcagtaaccacaggtaatatcagtaaacacggtgatgacgtgtttttcctgcggcgctttataaacgatcatctctttttcaagcgcattcaactgctttaacagcatcttattggtgacattgaccggagccgtgccactaacgtcatacattggcccctgaatgatatgtttaccatcatcggtgatgtacaacacgccgctgttagtcagaactgtcttcatgccagctacaggcgcgggctgaatatcgctgcttttgatgcccattttggctaacgtttgttgaattgccgcgtcatcagcctgagcaaagccactaaacgccgctaacaaagtaaacaacataaaacctttcttcataaatcttcccgttcttttcagacatcacgcccgcgggtgatgctgttgatgaagttgccgcagacgctcggtagcgacatgcgtataaatttgcgtggtggagagatcgctgtggcccagtagcatctgcaccacgcgtaaatccgcaccatgatttaataaatgagtggcaaaagcgtgacgcaacacatgcggactcagcttttcgctgtcgatacccgccagcacagcataatgtttaatacggtgccagaaggtctgtcgcgtcatctgctgcgcacgctggctgggaaacaacacgtcaatactcacaccattcagcagccacggacgcccatgttccagataggtttccagccagtaaaccgcctcttcacctaacggcaccagacgctctttgttgcctttaccaatgacccgtaccacgccctgacgcaggctgatatcactcattgtcagtccgaccagttcagagacacgcagcccggtagcatacaacacttcaagcatggctttatcgcgtagctccagtggctgatcgattaatggtgcctgtaataaacgttcgacctgcgcttcgcttaaatcttttggcaaacgctggggcaatttcggactagcgagatgcgcactgggatcgtcttcacgaaacttttcgcgataaagatactggaacaatcggcgcactgcactcagcaaacgcgcactgctggtggctttatacccgccctccagccgttctgccagtaatgcctgcaaatcgtcactttgcgccgtcgccagcgtcaacccgcggtgatgcaaccactccaccatcatactcagatcgcgacggtaagcgttcaacgtattttcagccagatttttttccagccacagagcatcaagaaactgctcgatgcgtgccagatcctgtttcacttgcgccccttatggtcactcatttgatccattatgccttattgtgccgtgactaaagcgattctgatacactagccgcaaaagccacagcagaatcgagaagcttacgttatgaatatgggtcttttttacggttccagcacctgttacaccgaaatggcggcagaaaaaatccgcgatattatcggcccagaactggtgaccttacataacctcaaggacgactccccgaaattaatggagcagtacgatgtgctcattctgggtatcccgacctgggattttggtgaaatccaggaagactgggaagccgtctgggatcagctcgacgacctgaaccttgaaggtaaaattgttgcgctgtatgggcttggcgatcaactgggatacggcgagtggttcctcgatgcgctcggtatgctgcatgacaaactcagcaccaaaggcgtgaagttcgtcggctactggccaacggaaggatatgaatttaccagcccgaaaccggtgattgctgacgggcaactgttcgtgggtctggcgctggatgaaactaaccagtatgaccttagcgacgagcgtattcagagctggtgcgagcaaatcctcaacgaaatggcagagcattacgcctgatctcactgacggcttagcgcatatgctttgccgtcatctttatctttgcgtctcttgttgcaacaaaatccgccgtaaatcccgccattcagcttcgtccatgctgtcggctgccagccataaatgttgccgtttaccgccatcagaacgtaaacgcagcatcatgccgctcttaatcatccacggtgctttgacgatgctccactcctgcccttgccaacgcaaacgcccgtccatcaacaagcgaatttccccctggcgagcattaatacgccgctggctgcgaacgcaatcaaacaccaccaggctaagtaacaccatccataacggggtgtaactgagtggccagggcatgagtaaaataacagcggcaaccagcccatgaatcagcaaggaaagccactgtgcgcgccaggagacgcgcaaatcagattgccacaggaccacgttcccggttccgtgtctggatgagtcggaccatcatttccagttctgcatcggccggtttaccgtgattcatcagccagttaaacaggtccggatcgtcacattccagcagacgaataaagatgcgtttttcgtcatcgcttaagctgtcgtactcatgttcgaaaaacggcatgatactaatatcgagttcgcgcataccacggcggcatgcccaatgaatgcgggctttgttgttaatgtccatcttcttcctgtctcacgaaaatccagtacccggctattgtaacgtgtttttcgccttcttttacgggaatatcagtaaacaccatcgcgatcgcgaaattaattcacaacaattcaatggcttcatttttttggaagtcgcctcgcagaaggcacagatcgcgtagtgaaagcacttgcattgcctcatagctcttttaccattagtcattaatacgccgttaagcaactcaggactctattatggcttttacaccttttcctccccgtcagcctacggcttctgcccgtttaccgctgacgctgatgacgcttgatgactgggcgcttgccaccattactggcgcggacagcgaaaaatatatgcagggtcaggtgacagcagatgtcagccagatggcagaagatcagcacctgctcgccgcccattgcgacgccaaaggtaaaatgtggagcaatttacgtctgttccgcgacggcgatggctttgcatggattgaacggcgcagcgtgcgtgaaccgcagctgactgaactgaaaaaatatgcggtattctctaaagtgaccatcgcgccagacgacgagcgtgtgctgcttggtgttgccggttttcaggcgcgcgccgcgctggcaaatctctttagcgaactgcctagcaaagaaaaacaggtagtcaaagaaggcgcgaccactttgctatggtttgaacacccggcagaacgtttcctgatcgtaaccgatgaagctactgctaatatgctgaccgataaactgcgcggtgaagcggaactgaacaatagccaacagtggctggcattaaacattgaagcgggtttcccggtgattgatgccgccaacagcgggcagtttatcccacaggcgaccaatctccaggcgctgggcggtatcagctttaagaaaggctgttataccggacaagagatggtggcgcgagcaaaattccgtggtgccaataaacgtgcgctctggttgctggcaggtagcgccagccgactgccggaagctggtgaagacttagagctgaaaatgggcgagaactggcgtcgtaccggtacggtactggctgcggtaaaactggaagatggtcaggtcgtggtacaggtcgtcatgaataacgatatggaaccggatagcatcttccgcgtacgcgacgatgcgaatacattgcatatcgagccgctgccgtatagcctcgaagagtaaatctctttatcgcatcaggcatttatcgcctgatgcgacgctggcgcgtcttatcatgtctgggatttgatgcctttatcacaacagggacgaggcccgtagatcggataaggcgttcacgccgaatccggcagttgtgctccgatgcctgatgcgacgctggcgcgtcttatcaggcctacaaaggcatacccattacgcctgcccaatatacaaatagatcgccagaaagtggcacacactaccgccgagcacgaagccgtgccagatggcatggttgtatggaatgcgtttgcagacgtagaaaatcaccccgaggctataaaccacgccgcctaccgccagtaaggtaacgctgcccgccgcgagcttaactgccatttcataaattaccaccaggctcagccagcccatcgccagataggtcaccagagataaaattttgaatcggtgcgcgatggtcagtttaaacagaatacccagcaatgccaggctccagataacaatcatcaacccgcgcgctaacggagaatccagccccaccagcaaaaacggcgtgtaggttccggcaatcaacaggtaaatagcgcaatggtcaaatttcttcagccacatttttgcccgttgatgaggaatggcgtgatagagcgtgctagcgaggaacagcaggatcatactgccgccatagaggctgtagctggttatcgctgtggcgctggcattaagatccaccgcctgaaccagtagcaacaccagcccaacgataccaaacaccaacccaatgccgtgactgacgctgttggctatttcctctgccagactatatccctgcttaatgaggggcttctgaaccataacttactccggagaaacgtacacgcacatgtatacctctccagcgtaactgagaatagttccagtgaacacctgttagctaaaataaattctgatttgagactaatctcctaaaaatcatgaaattaaatgcgaaatttcaactaacaggcgtgagttcaatttaaagacatttaaattcaatcacataaaattgtgtctgaccgggatagatgtcagcaatgacttttttcagttcagtcagggtcatattttcctgctctgcatgtttttcagtcagcgtatccagcgttacggtactggttgcggtgacttcaatcgtgcaaaaataaccgtcatcttcaaaacgtccgacacgaagcacatcacccgttttgaagtggctttcagactcgtcgcggatggtgatggttttacgcccagccagaatgtcatcctggaaacgttgaaaaaaagtgatgtcgtttggctgcatggtactatttcctgtaagaattgactcatctggagcctatgatagtgaaaaaactcaccttaccgaaagatttcttatggggcggcgcagttgccgctcatcaggtcgaaggcggctggaacaaaggcggaaaagggccgagcatttgtgacgttctgaccggtggcgcacacggcgtgccgcgcgaaatcaccaaagaagtcttgccaggaaaatactatccaaaccatgaagccgttgatttttatggtcactataaggaagacatcaagctatttgccgaaatgggcttcaaatgttttcgtacatccattgcctggacgcgcatttttccaaaaggcgatgaagctcagccaaacgaagaagggctgaagttctacgatgatatgttcgatgaactgctgaaatacaacatcgaaccggtgatcaccctctcccactttgaaatgccgctgcatctggtgcagcaatacggtagctggaccaaccgtaaagtggttgatttctttgtacgtttcgcggaagtggtatttgaacgctataagcacaaagtcaaatactggatgaccttcaacgaaattaacaaccagcgtaactggcgtgcaccgctgttcggttactgctgctccggcgtggtgtataccgagcatgaaaacccggaagagacgatgtatcaggtgctgcatcaccagtttgtcgccagcgccctggcggtgaaagctgcgcgtcgcattaacccggagatgaaagtcggctgtatgctggcgatggtgccgctctatccttactcctgtaacccggacgatgtgatgttcgctcaggagagcatgcgcgaacgctacgtctttaccgatgtgcagctacgcggctattacccgtcctatgtgttgaacgagtgggagcgtcgcggatttaacatcaaaatggaagacggcgatctggatgtgctgcgtgaaggcacctgcgattatcttggtttcagctattacatgaccaatgcagtgaaggccgaaggcggcaccggcgatgcgatctctggttttgaaggcagcgtaccaaacccgtatgttaaagcatctgactggggctggcagattgatccagtaggtctgcgctatgcactttgcgaactgtatgagcgttatcagaggccgctgtttattgtcgaaaacggttttggcgcttacgacaaagtggaagaagatggcagcatcaacgacgactaccgcattgactacctgcgcgcccatatcgaagagatgaaaaaagcggtgacttacgatggcgtggatctgatgggctacacaccgtggggctgcatcgactgcgtgagcttcaccaccgggcagtacagcaaacgctacggctttatctatgtgaataaacatgacgacggtactggcgatatgagccgtagtcgtaagaagagctttaactggtacaaagaggtgattgccagcaacggcgagaagctttaagtcgatgaagtaccggatgcaatacttgttgcatccggtcagacaacttccctgttttatttcccgcccgccaaatcgataaaacttcccgtgacgtaagaggctttatcacttagtagccagacaatggcctgcgcgacctcttctgcctgtccaccacgctgcatggggatgttgctcttaacgcgatcgacgcgtccaggctcgccgccgctggcgtgcatttcggtataaataaaccctggccgcacgcagttaacgcggatcccctgcgcggcgacttccaggcttagtccggtggttaacgtatcaatcgcccctttgcttgccgcgtaatcaacatattcccctgggctacccaaccgactggccacgctagagacattgacgatagcgccgccactgccaccatttttaagcgccatgcgttttaccgcctcgcggcagcagagaaaatatcccgtcacgttggtggaaagtactcggttgattcgctctgcggtaaggttttcaacggtgcactgggtaaacaagatcccggcgttattgaccagcgctgctagcggttcatcgtgctgatcgattgctgtaaacatcgcaacgacctggttttcgtcgctgatatccgcctggagcacgaatgctttgccaccggcttgcgttattaagttcatcacttcctgcgccgcgtggaggttttgctgataattaaccgccaccgtatacccttcttgcgccaacagtaatgcagttgcccgcccgatgccgcgactgccaccagtcacaagtgctatagccatttgtttttccgagaaaaattaattcgttgacgtatctttgagattgctaacaaactggctcaatcttcaatgttggcacgcttttccccctcgccctttcagggagagggccggggtgagggtaaatattcgcgccagtgccggcctgttcccctcaccctaaccctctccccaaaggggcgaggggactgtctgagcacttttgtactttgtcatctgactaaaaaggcgccgaagcgcctttagaaaatagtcgaatcagtgaattactggtattcgctaatcggtacgcaggagcagaacaggttacggtcgccgtaaacatcatccagacgtttcactgtcggccagtatttgtctgccacacctgccgggaataccgcaacttcacggctgtacggatgcgcccactcggcgaccagttcgctctgaatgtgcggcgcgttcaccagcgggttatcttccagcggccagacaccggctttcacctggtcaatttctgcgcggatagccagcatcgcgtcgataaagcgatccagttccactttgctttcagattcagtcggttcaaccatcagcgtacccgccaccgggaagctcatcgtcggcgcgtggaaaccgtagtcgatcaggcgcttggcaatatccagctcgctgatgccggtttcttctttcagcgggcgaatatcgagaatacattcgtgcgccacgcgaccgtcgcgaccggtatacagcaccgggaaggcatcctgcaggcggctggcaatatagttggcgttgaggattgccacctggcttgcttttttcagcccttctgcgcccatcatgcggatgtacatccagctgattggcaggatagaggcgctaccgaacggtgccgcagaaaccgcgccctgacgggttaacatgccttcgatttgcaccacgctatgacccggtacaaacggtgccaaatgcgctttcacgccgatcggtcccatacccggaccaccaccgccgtgcggaatgcagaaagttttatgtaggttaaggtgactaacgtccgcaccaataaagcccgggctggtgatgccaacctgggcgttcatgttcgcgccatcaaggtaaacctgaccgccgaactgatgcacgacttcacacacttcacggatcgtttcttcatacacgccgtgggtagaaggataagtcaccatgatacaggagaggttatcgcccgcctgttccgctttcgcgcgcagatcagtcagatcgatgttgccgtttttatcacacgccacaaccaccacctgcattcctgccatatgtgcagaagcggggttagttccgtgcgcagaagccgggatcaggcagatatcgcgatgcccttcgttgcggctttcatgataatgacgaatcgccagcaggcccgcgtattcgccctgtgcgccagagttcggctgcatacaaacggcgtcgtaaccggtcagtttcaccagccagtcagccagctgcgcaatcatctgctgataaccttcggcctgctccggcgggcagaacgggtgcagttcggcaaattccggccaggtgattgggatcatctcggcggcggcgttcagtttcatggtgcaggaacccagcgggatcatcgcctgattcagcgccagatctttacgctccaggctgtgcatatagcgcatcatttcggtttcgctgtggtagcgattaaacaccggatgggtgaggatttcgtcgtcgcgcagcatcgcaggctggatagagcggctgtcgtgagccacgtctttgtccagcgtgtcgatgtccaggccgtggttatcgcccagcagcacgttgaaaagctgcattacgttttcacgcgtggttgtttcatcaagggtgatcccaaccgcgttcagaatatcgctacgcaggttgatttcagccgcttcggcacgcgtcagtacgcccgctttgtcggccacttccacacacaaggtgtcgaaatagtgcgcatggcgcagtttcagacctttttgttgcaggcccgccgccaggatatcggtcagacggtgaatgcggttagcgatacgtttcaggccaaccgggccgtgataaacggcatacaggctggcgatgtttgccagcagtacctgggaagtacaaatgttggagttcgctttctcacggcggatatgttgctcgcgagtctgcatcgccatgcgcagcgcggtattgccagctgcatctttgcttacaccgataatacggcccggcatactgcgtttgtattcatctttcgccgcaaagaatgccgcgtgtgggccaccgtagcccatcggcacgccgaagcgttgcgcgctaccaaaaacaatatccgcgccctgtttacccggcgcagttaacagcaccagcgccataatatcggcggcaacgctgaccacaattttgcgacttttcagttcgctaataagcgcagtgtagtcgtgaatttcaccggtagtgcctacctgctgtaacagcacgccgaagacgtcctgatggtcgagcactttttgcgcgtcatcgacaatcacttcaaaaccaaaggtttcggcacgagtacggaccacatccagcgtttgcggatgcacatcggaagccacgaagaagcggttggcatttttcagtttgctgacgcgtttcgccatcgccattgcttcggcggcagcggtggcctcgtccagaagagaagcagaggccatatccagtccagtcaaatccagcgttacctgctggaagttgagcagtgcttcaaggcggccctgggagacttcaggttgatacggagtgtacgcggtataccagcccggattttccagcatgttacgcaggataaccggcggtagctgcacggcggtgtaacccatgccgatgtaagacgtgaagcgtttattgcgactggcaatagccttgagttctgccagtgcggcgtattcggtcgccggtgcgccaacctgcggtggtgtcgcaagttgaatatctttcggcacaatctggccggtcagcgcgtttaagctttgtgcaccaacggcattcagcatttcttgctgttgcgcggcgtccggtccgatatggcgttcaataaaagcgccgctgttttcaagctggcttaacgtctgtgtcatgagcgatggttcctgaaacgtgcagtgaattgtgaacctctctccttacgaagagagtgagggtgaggcataaattttcctcaccctgatcctctcccgcagaagaggaataaagccgttactcgtcttctaacaatgcttcgtatgcggtcgcatccagcagactttccagttcgctttcatcgctggctttgattttaaagatccagccgcctgcatacggttcgctgttcaccagttccggggaatcgctcagtgcgtcgtttaccgccacgatttcaccgcttactggcgcataaatgtcactcgccgcttttacgctttcggcaaccgcgcagtcatcgcccgcgctaaccgttgcgcccacttccggcaggtcaacaaacaccatatcgcctaacagctcctgagcatgttcggtaataccaacggtgtaagtgccgtcggcttctttacgcagccattcgtgttctttgctgtatttcagttctgctggtacgttgctcatcaatcaatctccaaaaaagtaaatcacgcgacggctttgccgttacgcacaaaaacaggttttgtcactttaaccggcatttcacggttgcgaatttgcacaatcgccgtttcgccaataccttccggcacgcgcgccagcgcaatgctgtaacccagcgtcggggagaaagtaccgctggtgataatgccttcatgctggttgccctgcgcatcggtaaagcgtaccggcagttcattacgcagcacgcctttttcggtcatcaccagaccaaccagtttttctgtaccatgctcacgctgcacttccagggcttcacgaccgataaagtcacgatctgccggttcccaggcgatggtccagcccatgttggcggctaaaggagagatggtttcgtccatctcctgaccataaagattcatgcccgcttccagacgcagcgtgtcacgcgcgcccaagccacatggcttaacacccgcttccaccagcgcacgccagaaatcggccgctttttcattgggcagcgcaatttcatagcccgcttcaccggtataaccagtggtggcaataaacagatcgcccgcctgcacgccaaagaacggtttcatcccttccaccgcctgacgctgggcgtcattaaacagtgtggcagcttttgcctgcgcattcggcccttgcacggcaatcatggaaaggtcatcacgaacggtaatttcgatgccgaaaggttcagcgtgttgggtaatccaggagaggtctttttcgcgggtggcggagttaacaacgaggcggaagaaatcttcagtaaagtagtagacgatgaggtcatctatcacaccgccagaggcattcaacatcccgctgtaaagggctttgccgcttttggtgagcttcgccacatcgttcgccagcagataacgcagaaactcccgggtgcggctgccgcgaagatcgacgatggtcatatgactcacatcaaacattccggcatcggtacgtaccgcatgatgttcgtcgatttggctaccgtaatgcagcggcatcatccagccgtggaaatccaccatgcgagcgccgcaaagcgtgtgttgttcgtacaaaggagtctgttgtgccatcttgtcctcattgaataagcggggctgacaactttttcatggtgaaattatcaccacgaaacccagcatcggagccactcccggtccccaacgcaatcgttctcttttgcctgaacttaccaccgaaacagactgttaaccataaggtaaaattgatcatcacattagcttatggttaaaaaatgcaaaaatcgcgacagaataaaaaaccaaaaaatacaccagtttctatacaaagatgatgtgatgagaaagtcaatttgaataagacaatattaagagctaaaaaaatgtcaaaaaacactaaatcaaaaaataatggcattagaaaatataatgcgaaaacggaggtgaaattagtttatttcaaatgaggaaaatctcccggcgaaaaaaccgggagatgaaagtgtgatgggtatcaaataaacaacagaggagaaatttttaacgcagccattcaggcaaatcgtttaatcccattgcctggcggataagttgcggcttaacgccaggaagcgtgtcggccagtttcaaaccaatatcacgcagcagttttttcgccggattggtaccggaaaacagatcgcggaatccctgcataccagccagcatcaacgccgcactgtgcttgcggctacgctcatagcgacgcagataaatgtactgcccgatgtctttcccctgacgatgcaaccgtttcagttcggcaatcagctctgcagcatccataaagccgagatttaccccctgccccgccagcgggtgaatggtatgtgcggcgtcgcccaccagcgccagacggtggctggcaaactggcgcgcataacgccccgtcagtgggaacacctgacgcgcgctctcaaccttgcataagcccaggcgattatcaaaagcgatatttaacgcgcgattaaattcgtcttcacttgcctgctgcatccgctgcgcttcctctgggctcagactccagacaatgctgcaaagatgcggatcgctaagcggtaaaaaggccagaatgccttcgccatggaaaacctgccgcgccaccgcatcatgcggttcttccgtgcgaatggtcgctaccagcgcgtgatgctgataatcccagaaagtcagcggaatatcggctttgttgcgcaaccaggaattagcgccgtccgcgccaatcaccagacgcgccgttaacatgctgccatctttcagcgtcaggaaggtttcattttctccccaggcgacctgctgtaattctgcgggggctaacagagtgatatcactgctctgatgcgctttgttccacagcgcgtagtgaatcacactattttcaacgatatgcccaagatggctatagcccatgctttgatcgtcaaagctaatgtgaccaaagctgtctttgtcccacacttccataccgtgataacagctggccctacgagagagaatgtcctgccagacgccaagacgggtgagtaatttttcgctggcggcattgatagcgctaacgcgcagttgtggtggtgcattcgccgccagaggttcctgtacgcgctgctccagtacggcaacgcgtaagccgctcccctgtaagccacaggcaaccgccagccccaccatgccgccgccaacaatggctacatcaacactttgcattgtttattccttaaaaccgccttcaacgcgccacccaaccgagggtgcgctgcgccagcacatcgcgtgccggggtgaataattccatcgtcatcagcccgatgttgcgcccgacaaccagcggtgcccaacggttggcaaaaagatgtacaaggctgtccgtgacgccaatggttgcttcgcgatcgctctgtcgacgctgctgataacggcacaatacgccgtaatcccccatgtcttctccgcgctcctgcgcctgagtcagggtttccgcaagactcatcacatctcgcataccgaggttaaacccttgcccggcaatcgggtgcagagtttgcgccgcattgcccaccagcacggtacgatgggtaatagatctggcggcgtgggttaacgccagcggataagcactgcgtttaccagcgtgggtaattttcccaagtcgccagccaaaggcgctctggagttcacggcaaaacttctcgtcactccagctcaacacctcttcgcgccgttccagtggatgacaccagaccaggctacagcgtccgtcagacatcggcaacatcgccagcgggccatgttgcgtaaagcgttcaaaagcgcgcccttcatgcgcaacggaagtagcaacgttggcaatcacggccagttgttcgtaaggctcctgctgccagtcaacgccgcacgcggtggctaacgcactatgggtgccatcagctgctaccagcacgcggcccgtcagcgtctcgccactctccagcgtcacttcaacgtgactctgagtacgggcaacgttagccacgcgatcagggcaatgcagcgttacgccaggtgctttacgcagcaatgcaaacagccgttgcccgacattgtgcaattcgacaacctgtcccagcgccgccagttggtaatcttctgcggcgagggtgacaaatccagcgtgaccacgatcgctgacatgcacggtggtgatggcagttgcgcaatccgccagagattgccagacgccgatgcgcgccagttgctgacaggtacccgccgccagcgctatcgctcgtccatcaaagcccggatgagcatgactctctggcgcagtcgcttcaatcaaatgtaccggcagcgccccgtgacttaaccgggaaatagccagcgccagcgtcgcgcccgccatgccgccaccgacgatgattacgctcattgctttctcgcagcaaccatcaacgcttcgatttcttccggctttttcaccacgctggcggtgaggttttcgttaccggtttcggtaatcacaatgtcgtcttcaatacgaatgccgataccgcgatattgttctggcacttctgcatccggcgcaatatacagccctggctctacggtcagtaccatgcccggttccagaatgcggctgcgatcctgaccataaacacccacgtcatggacatccagtcctaaccagtggctaaggccatgcataaagaaaggacgatgggcgttctgagcgatcagttcatcaacatcacctttcaggatgccgagttttaccaggccgctaaccatgatgcgcaccacttcaccagtgacttccagaatggaagttcccggacgatacaggcgcaggctggtttcgagagactccagcacaatgtcgtagatttcacgctgggcctgggtgaatttgccgttgaccgggaaggtgcgggtaatatcgccagcgtaacctttgtattcacaacccgcgtcaatcaacaccaggtcgccgtcgcgcatttcacactcgttttcggtgtagtgcagaatgcagccgttttcaccgctgccgacaatggtgttataggacggatagcgcgcaccgtggcggttaaattcgtggtgaatttcgccttccagatggtactcgaacattcccggacggcatttttccatcgcccgtgtatgtgccatggcggtgatttctcccgcgcggcggagtacggcaatctcttctgggcttttgaacaggcgcatttcatgaacaacaggacgccagtcgatcatcgttgccggtgcggtgagattttgccggctacctttacgcagtttttccagcgcactgttcacgattacatcagcatatgcatattcgccctgggcatggtaaaccacatccaggccgttaagtagttgataaagttgctgattgatttcgctgaatgccagtgcgcggtcaacgcccagtttctctggcgcggcatcctggcctaagcgacggccaaaccagatctccgccgtcaggtcgcgaacgcggttaaacagaacgctgtggttatgagtgtcatcgcttttaatcagcaccagcaccgcttccggttcgttaaagccggtgaagtaccagaagtcactgttctgacgataggggtattcgctgtcggcgctacgtgttacttctggtgcagcaaaaatcagcgcggcgctgccgggttgcatttgctccaccagggcctgacggcgacgctgaaactcttgccgggatatctcactcataacactctccttacgttttttgtttttagtgtagagtcggtttttgtacttctggcgcggtcggttgcggatgagtaaaggtgtcgtggcataacagcgcggcaacacgaacgtattcgatgatctcttcaaggctcatttcaagctcttcctgatcttcgtcttcgtcgtaacccagttgcgcaatgttacgcagatcgtcgatagcttcaccggtttcgccggtcactttatccagcttcggttgcgtaacgccaagaccaagcaggaagtgattgacccaacctgccaatgcatcagcccgatcgaaaacgctgacatcatcgccatcaggcagataaagctgaaaaaggaagccgtcatcctgcagggcatcgctggtggcagagtgcattttacgcagtgcctgtgccagctcatgaccgaaagccatgccttcgttcgtcaggtcgtgaagtagcggtagccaactgctgtcatcgttaccgccacatatcatcccgctgattaaaccatgcatctcagctggggtcagacccgtcccttgttggttcagatactggttcatttcgttgtaaccaggcatttcgttctgtatagacataagcattcgtcgtcaaagggaggaatattcatgatatgctaccactttgggccctggtggaccagaaaagggcttgtctcttctcatcagggtagctatagtgtcgccccttcgcagaccatgggtctaaagacgaaggcagcgcagtcaatcagcaggaaggtggcatgtctgcacaacccgtcgatatccaaatttttggccgtagtctgcgtgtgaactgcccgcctgaccaaagggatgcgttgaatcaggcagcggacgatctgaaccaacggttgcaagatctgaaagaacgcactagagtcacaaatactgaacagttggtcttcattgccgcattgaatatcagctatgagttagcgcaagaaaaagcaaagactcgtgactacgcggcaagtatggaacagcgtattcggatgctgcagcagaccatagaacaagcgttacttgaacaaggtcgcatcaccgaaaaaactaaccaaaactttgaatgacacttttcggtttactgtggtagagtaaccgtgaagacaaaatttctctgagatgttcgcaagcgggccagtcccctgagccgatatttcataccacaagaatgtggcgctccgcggttggtgagcatgctcggtccgtccgagaagccttaaaactgcgacgacacattcaccttgaaccaagggttcaagggttacagcctgcggcggcatctcggagattcccttcttatctggcaccagccatgacgcaactaccagaactcccactgacattatcccgacaagaaatccgcaaaatgattcggcaacgtcgtcgtgcgttaacgccggaacaacagcaggaaatgggtcaacaagccgctacccggatgatgacttatcccccggtggtgatggcacatacggtcgctgtattcctctcttttgatggcgaactcgacacccagccactcatagaacaactctggcgcgccggtaagcgcgtatatcttccagttttgcatccctttagtgccggtaatttgctgttcctgaattaccatccgcaaagcgaactggtgatgaacaggttgaagatccatgagccaaaattggatgtgcgtgacgtgctacccctttcccgattagacgtgctgatcacaccgctggtcgcctttgatgagtacggtcagcgcctgggaatgggcggtggtttttatgatcggaccttacaaaactggcagcactataaaacgcaaccggtgggttatgcgcatgattgtcagttggtggaaaaactccccgttgaagagtgggatatccctcttcctgcggtggttacaccgagcaaagtctgggagtggtaagggcgatacacccgcatcgccctgattgacatcgttgattctttgacctaatttagtgagtaagggtaagggaggattgctcctcccctgagactgactgttaataagcgctgaaacttatgagtaacagtacaatcagtatgatgacaagtcgcatcataacccttctccttcaagccctcgcttcggtgagggctttaccgttacagccccatgctgccctgccatcgtaaatccccattaaataaacacaacgcattgatctgactttgatttattttctggagcagactcgcaaagtagaatgcgcaacgcggcaacggtgtggagaagggataaaaaaacgggcaagtcagtgacctgcccgttgattttcagagaaggggaattagtacagcagacgggcgcgaatggtacccggaatagctttcattgcctgcagcgctttttcggcaacgtcttcgtcggcttcaatatcaataaccacataacccatctgggcggaagtttgcagatattgcgcggcgatgttgacgccctgctcggcgaagattttgttcagcgcagttagcacgcccggacggttttcgtggatgtgcatcagacgacgcccaccgtgcagtggcaggctgacttccgggaagttcaccgcagagagcgtactgccattgtcagaatacttgatcaatttacccgcaacttccaggccgatattctcctgcgcttcctgagtgctaccgccaatgtgtggcgtcagaaggacgttgtcgaattcacacagcggagaggtaaatggatcgctattggtcgccggttccgtcgggaatacgtcgattgccgcccccgccagatgtttgctcgccagcgcatcacacagcgccggaatatccaccacagtaccgcggctagcattaatcagcaggctgccgggcttcattagactaatttctttcgcgcccatcatatttttggtggacggattctctggtacatgcagactcaccacatcgctcatattcagcaggtcagaaagatgctgtacctgagtggcgttgcccagcggcagtttattttcaatatcataaaagtaaacatacattcccaggctttcagccagaatgcccaattgcgtaccaatatgaccgtagccgatgatacccagctttttgccgcgcgcttcaaaagaacccgccgccagtttgttccacacgccacggtgcgctttagcattggcttccggcacgccgcgcaatagcagcagcagttcgccaatcaccagctccgcaacagagcgcgtattactgaacggtgcgttaaataccgggatcccgcgctttgccgccgcatccagatcaacctggtttgttccgatacagaaacagccaatagcgaccagtttttctgcggcgttgatcacgtcttcagtcagatgggtacgggatcgcaggccgatgaagtgggcatcgcggatggattcttttaattgttcatcatccagcgcgcctttgtgaaattcgatgttggtgtaaccagctgcacgaaggctttccagcgccttttggtgcacgccttctaccagcagaaacttaatcttgtctttctccaggcttacctttgccatttacccaatcctgtcttttgaaatgttgtgtgcggatttgcatccgcctttcaacatatcaaaaaataatattgcggcaatatgaacgtttgcgtcgcgatgttgaggaaatatcacgcaaaggtaattcttggatgaatatgctggtttagaggatttatttagagcaatcgacaattgcctggtaaaagcgtgacacatgtcaccaaatttaatgaagagaatttttttaacgggggaggttcccccgtcagatcatttcacaatggttttgacaccgtcaggtgtgccaatcagcgcaacgtccgcgccacggttagcaaacaagccaacagtcaccacgccaggaatcgcatttatggcgttttccatcgctatcgggtcaaggatttccatgccgtggacgtcgaggatcacgttgccattatcggtcaccacgccctgacggtattccggacgaccgcccagtttcaccagctgacgcgccactgcactacgtgccatcgggataacttctactggcagcgggaatttacccagaatatcaacctgcttggaagcgtctgcaatacagataaatttttctgcaacgctagcaatgattttttcacgggtcagcgccgcgccgccgcctttgatcatttgcatgtggccgttgatttcatctgcgccatcaacgtagatgccaaggctgtcgacttcgttgagatcaaaaacgtgaatgccgaggcttttcagtttttcagtggaagcatcactactggaaacggccccttcaatctggcctttcattgtaccgagcgcgtcaataaagtgtgcggcggtggaacctgtacctacaccaacaatggtgccgggctgaacatactgaagtgccgcccatcctactgcttttttcaattcatcctgcgtcatgatcgtttcgcctgtggtatgaaatttcacacgcattatatacaaaaaaagcgattcagaccccgttggcaagccgcgtggttaactcatccataaaatatcgcgcaatggcaggcatcccctttcgccccgcaaataaagcatacaacggtctgggtatgccgctccacggtgcaaacaggcgcaccagttcaccgttcgcaagcccctgtttacaggcaaattgaggcaataacgccacgccattcaacacaaccagggcgcgaactcgctgagcgaaatgcattagcgcaaatccctgatcttttaagctgcgcttttaaccacggatacaaatgttacccgccgacggcttcggtatatgcaacctgacacaaaattgtgtcatagtgcaggaaaaagcatttaccaggagcagacaacagcaatgaaacgcccggactacagaacattacaggcactggatgcggtgatacgtgaacgaggatttgagcgcgcggcacaaaagctgtgcattacacaaagtgccgtcagtcagcgcattaagcaactggaaaatatgttcgggcagccgctgttggtgcgtaccgtaccgccgcgcccgacggaacaagggcaaaaactgctggcactgctgcgccaggtggagttgctggaagaagagtggctgggcgatgaacaaaccggtagcactccgctgctgcttagtctggcggtcaacgccgacagtctggcgacgtggttgcttcctgcactggctcctgtgttggctgatagccctatccgcctcaacttgcaggtagaagatgaaacccgcactcaggaacgtctgcgccgcggcgaagtggtcggcgcggtgagtattcaacatcaggcgctgccgagttgtcttgtcgataaacttggtgcgctcgactatctgttcgtcagcagtaaaccctttgccgaaaaatatttccctaacggcgtaacgcgtagcgcattactgaaagcgccagtggtcgcgtttgaccatcttgacgatatgcaccaggcctttttgcagcaaaacttcgatctgcctccaggcagcgtgccctgccatatcgttaattctagtgaagcgttcgtacaacttgctcgccagggcaccacctgctgtatgatcccgcacctgcaaatcgagaaagagctggccagcggtgaactgattgacttaacgcctgggctatttcaacgacggatgctctactggcaccgctttgctcctgaaagccgcatgatgcgtaaagtcactgatgcgttactcgattatggtcacaaagtccttcgtcaggattaatccatcaaataatgcctgatagcacatatcaggcgttgtcctcacttctttttgtattccttgaatcacatcacaaaatagacaaatctcaggcggcaaaaaacgacgtctgaatgcattttttttgctggcgacaaacccacgtaaaaagctcaccgtaggcgcaaataccctcattttgattgcgttttacggagcaaataatgtctaacgtgcaggagtggcaacagcttgccaacaaggaattgagccgtcgggagaaaactgtcgacagcctggttcatcaaaccgcggaagggatcgccatcaagccgctgtataccgaagccgatctcgataatctggaggtgacaggtacccttcctggtttgccgccctacgttcgtggcccgcgtgccactatgtataccgcccaaccgtggaccatccgtcagtatgctggttttagtacagcaaaagagtccaacgctttttatcgccgtaacctggccgccgggcaaaaaggtctttccgttgcgtttgaccttgccacccaccgtggctacgactccgataacccgcgcgtggcgggcgacgtcggcaaagcgggcgtcgctatcgacaccgtggaagatatgaaagtcctgttcgaccagatcccgctggataaaatgagcgttagcatgaccatgaatggcgcagtgctaccagtactggcgttttatatcgtcgccgcagaagagcaaggtgttacacctgataaactgaccggcaccattcaaaacgatattctcaaagagtacctctgccgcaacacctatatttacccaccaaaaccgagtatgcgcattatcgccgacatcatcgcctggtgttccggcaacatgccgcgatttaataccatcagtatcagcggttaccacatgggtgaagcgggtgccaactgcgtgcagcaggtagcatttacgctcgctgatgggattgagtacatcaaagcagcaatctctgccggactgaaaattgatgacttcgctcctcgcctgagcttcttcttcggcatcggcatggatctgtttatgaacgtcgccatgttgcgtgcggcacgttatttatggagcgaagcggtcagtggatttggcgcacaggacccgaaaagtctggcgctgcgtacccactgccagaccagtggctggagcctgactgaacaggatccgtataacaacgttatccgcaccaccattgaagcgctggctgcgacgctgggcggtactcagagtctgcataccaacgcctttgacgaagcgcttggtttgcctaccgatttcagtgcacgcattgcccgcaacacccagatcatcatccaggaagaaagtgaactctgccgcaccgtcgatccactggccggatcctattacattgagagcctgaccgatcaaatcgtcaaacaagccagagctattatccaacagatcgacgaagccggtggcatggcgaaagcgatcgaagcaggtctgccaaaacgaatgatcgaagaggccagtgcgcgcgaacagagcctgatcgaccagggcaagcgtgtcatcgttggtgtcaacaagtacaaactggatcacgaagacgaaaccgatgtacttgagatcgacaacgtgatggtgcgtaacgagcaaattgctagcctggaacgcattcgcgccacccgtgatgatgccgccgtaaccgccgcgttgaacgccctgactcacgccgcacagcataacgaaaacctgctggctgccgctgttaatgccgctcgcgttcgcgccaccctgggtgaaatttccgatgcgctggaagtcgctttcgaccgttatctggtgccaagccagtgtgttaccggcgtgattgcgcaaagctatcatcagtctgagaaaagcgcctccgagttcgatgccattgttgcgcaaacggagcagttccttgccgacaatggtcgtcgcccgcgcattctgatcgctaagatgggccaggatggacacgatcgcggcgcgaaagtgatcgccagcgcctattccgatctcggtttcgacgtagatttaagcccgatgttctctacacctgaagagatcgcccgcctggccgtagaaaacgacgttcacgtagtgggcgcatccagtctggctgccggtcataaaacgctgatcccggaactggtcgaagcgctgaaaaaatggggacgcgaagatatctgcgtggtcgcgggtggcgtcattccgccgcaggattacgccttcctgcaagagcgcggcgtggcggcgatttatggtccaggtacacctatgctcgacagtgtgcgcgacgtactgaatctgataagccagcatcatgattaatgaagccacgctggcagaaagtattcgccgcttacgtcagggtgagcgtgccacactcgcccaggccatgacgctggtggaaagccgtcacccgcgtcatcaggcactaagtacgcagctgcttgatgccattatgccgtactgcggtaacaccctgcgactgggcgttaccggcacccccggcgcggggaaaagtacctttcttgaggcctttggcatgttgttgattcgagagggattaaaggtcgcggttattgcggtcgatcccagcagcccggtcactggcggtagcattctcggggataaaacccgcatgaatgacctggcgcgtgccgaagcggcgtttattcgcccggtaccatcctccggtcatctgggcggtgccagtcagcgagcgcgggaattaatgctgttatgcgaagcagcgggttatgacgtagtgattgtcgaaacggttggcgtcgggcagagcgaaacagaagtcgcccgcatggtggactgttttatcagcttgcaaattgccggtggcggcgatgatctgcagggcattaaaaaagggctgatggaagtggctgatctgatcgttatcaacaaagacgatggcgataaccataccaatgtcgccattgcccggcatatgtacgagagtgccctgcatattctgcgacgtaaatacgacgaatggcagccacgggttctgacttgtagcgcactggaaaaacgtggaatcgatgagatctggcacgccatcatcgacttcaaaaccgcgctaactgccagtggtcgtttacaacaagtgcggcaacaacaaagcgtggaatggctgcgtaagcagaccgaagaagaagtactgaatcacctgttcgcgaatgaagatttcgatcgctattaccgccagacgcttttagcggtcaaaaacaatacgctcagtccgcgcaccggcctgcggcagctcagtgaatttatccagacgcaatattttgattaaaggaatttttatgtcttatcagtatgttaacgttgtcactatcaacaaagtggcggtcattgagtttaactatggccgaaaacttaatgccttaagtaaagtctttattgatgatcttatgcaggcgttaagcgatctcaaccggccggaaattcgctgtatcattttgcgcgcaccgagtggatccaaagtcttctccgcaggtcacgatattcacgaactgccgtctggcggtcgcgatccgctctcctatgatgatccattgcgtcaaatcacccgcatgatccaaaaattcccgaaaccgatcattagcatggtggaaggtagtgtttggggtggcgcatttgaaatgatcatgagttccgatctgatcatcgccgccagtaccagtaccttcagtatgacgcctgtaaacctcggcgtcccgtataacctggtcggcattcacaacctgacccgcgacgcgggcttccacattgtcaaagagctgatttttaccgctagcccaatcaccgcccagcgcgcgctggctgtcggcatcctcaaccatgttgtggaagtggaagaactggaagatttcaccttacaaatggcgcaccacatctctgagaaagcgccgttagccattgccgttatcaaagaagagctgcgtgtactgggcgaagcacacaccatgaactccgatgaatttgaacgtattcaggggatgcgccgcgcggtgtatgacagcgaagattaccaggaagggatgaacgctttcctcgaaaaacgtaaacctaatttcgttggtcattaatccctgcgaacgaaggagtaaaaatggaaactcagtggacaaggatgaccgccaatgaagcggcagaaattatccagcataacgacatggtggcatttagcggctttaccccggcgggtagcccgaaagccctacccaccgcgattgcccgcagagctaacgaacagcatgaggccaaaaagccgtatcaaattcgccttctgacgggtgcgagtatcagcgccgccgctgacgatgtactttctgacgccgatgctgtttcctggcgtgcgccatatcaaacaagctccggtttacgtaaaaagatcaatcagggcgcggtgagtttcgttgacctgcatttgagcgaagtggcgcaaatggtcaattacggtttcttcggcgacattgatgttgccgtcattgaagcaagcgcactggcaccggatggtcgagtctggttaaccagcgggatcggtaatgcgccgacctggctgctgcgggcgaagaaagtgatcattgaactcaatcactatcacgatccgcgcgttgcagaactggcggatattgtgattcctggcgcgccaccgcggcgcaatagcgtgagcatcttccatgcaatggatcgcgtcggtacccgctatgtgcaaatcgatccgaaaaagattgtcgccgtcgtggaaaccaacttgcccgacgccggtaatatgctggataagcaaaatcccatgtgccagcagattgccgataacgtggtcacgttcttattgcaggaaatggcgcatgggcgtattccgccggaatttctgccgctgcaaagtggcgtgggcaatatcaataatgcggtaatggcgcgtctgggggaaaacccggtaattcctccgtttatgatgtatagcgaagtgctacaggaaagcgtggtgcatttactggaaaccggcaaaatcagcggggccagcgcctccagcctgacaatcagcgccgattccctgcgcaagatttacgacaatatggattactttgccagccgcattgtgttgcgtccgcaggagatttccaataacccggaaatcatccgtcgtctgggcgtcatcgctctgaacgtcggcctggagtttgatatttacgggcatgccaacagtacacacgtagccggggtcgatctgatgaacggcatcggcggcagcggtgattttgaacgcaacgcgtatctgagcatctttatggccccgagcattgctaaagaaggcaagatcagtaccgtcgtgccaatgtgcagccatgttgatcacagcgaacacagcgtcaaagtgatcatcaccgaacaagggatcgccgatctgcgcggtctttccccgcttcaacgcgcccgcactatcattgataattgtgcacatcctatgtatcgggattatctgcatcgctatctggaaaatgcgcctggcggacatattcaccacgatcttagccacgtcttcgacttacaccgtaatttaattgcaaccggcagcatgctgggttaatgactcgtcccgtcacgatcttcagcaatatgctgaagcatcgtggcggtataacgatgatttctgatactataaagatattcctgcatatacatcggcctgtgcggtgcatcaaaatatttcagcgttgccggattcaccagtcgccaggcaaaatgcgggatcaccgtcagaaaatgtccgcgctccacggcgctgattttggccataaaactgtagggacgataaataatggttggattgatcccacaaggtcgcatattcgcatcaatcattgcttcgaagttggcccggttctgaaagcgcatttgtagccagggcagctcctgaagcagctcttgctcttgtcgctcttcataacggcgagaaacgagaaagcctaatcgcagcggtggtagttcactgatagtcaggttttccagttcctgaactcgtgcagatacatgctgtggggagataataaaatctaactggcggtcaaaaagattatcgataacgccattttcgctgaactcaactggctgggcggtcacgccttcatacttatctccgagactaatcaactgatcgaaaataattgtcggataagtattatctatgccaatcacaatttctcgactacgacgcccactgttatggatttcattatcaatcgcagaaagccgttgataaaccgggaacagtttttgatacagttcctgtccggctttattgaggctgatattattatctttgcgggtaaatagcgtatagccaatttgttcttccagcgcggcaatgcttttaccaaatgggctagccgtcatatggattttttctgccgcccgggcaatattattggtttgcgctaataaaatgaaattgcgcatctttttgctaataaaaatgtccatccccctcccccgcatccttgtccgcttaaccgtttcagtcagcctatccttgatgaaaccgcgagcaaagataggtgattacgtcatggttttacagaaaattacagaaaaaggaggcaatatcgggtaaaggcattagcccgacgaatacgtcgggctacaaatattattgtgctgcaggtgttttagcgggttgttgatccacaggttctaactggaagaccacatcgacctgatcatcaaactgaatagcggcctgctcgtaagtttcctgggcggacaccggcgcggcatcggctttcatcatccgcaccattgggctgggctgatagttggaaacatggtagcgcacgctatataccggccccagtttacgatgaaagccgttcgccagttcctgcgcctgatgaatcgcgttatcaatcgctgccttacgcgctttgtctttataggcatccggctgcgccacgcccaggctcacagaacgaatttcgttaagacccgccttcagcgcgccatccagcaaggaattcagtttgtctaactgacggagcgtgacttccaccgttctcacagcgcggtagcctttaaggatacttttaccatcctgataatcataatctggctgggtgcgtaagttcgcactgctgatatcttttttcgcgatctgattgagttcaaggaaggaaatgtattgtgcgacgcgctcatctgcctgtttcttggcagtagcggcatccttcgcggccacgttaacttcaatcgcaagagtggcaatgtctggcaccgcatccacgcttgccgtaccggaggtgacaatatgcggtccatccggcaattcgttagcctgcgctgccatcccgctaatacccattaatgccgccagggcgataactttgaacttcacgttagtctctccgtgttaattgacttgcccaaaattcaggacctctggaggcaagcttagcgcctctgttttatttttccatcagatagcgcttaactgaacaaggcttgtgcatgagcaataccgtctctcgccagctgcaaggcaataaaccacataacacatcccacaaccagattgataatgcgctgtgcttttgccgtgcgcagacgcggtgccagccaggctgcgagaagagccagaccaaagaaccacaggaaagaggcgctaattgtcccgagtgcaaaccagcgttttggttccacatcaagttgcccgccaaggctgcccagtacaacaaaagtatccaggtaaacatgcggattcagccaggtcactgccaacatggtggcgataattttccatctgccttgcttcatgacttcggcgctggctaactcaatattactgctcattgctgttttaaaagcgccaaaaccataccacagcaagaaggctacgccgccccaggtgaccagcgccagcaaccacgggctctgcatcaataacgcgctgccaccaaaaatcccggcgcaaatcaggaccaaatcgctgatagcacaaagtaaggcaatcataatgtggtactgacgacgtatgccctgattcatcacaaaagcattttgtggaccgagcggtaggatcatagccgccccaagtgcaagaccttgaaagtaataagaaaacacgttggatattccgaattaagtatctgatgcagagactatatcgcgggattgttattagcggaaattgataatattaattggcaatcagaaaaactaataagagagaggccagagagtattatctggcctcagcgttgattacgcagctttgtcttctttcacccgcttaaagttcacatccatttgcgggtacgggaagctgataccggcggcatcaaattcacgtttaatacgctccagcacatcccagtacacgttttgcagatcgccgctgttgctccagacgcggaccacgaaattaatgctgcttgcaccaagttcgttcaggcgcacagtcatttcgcgatctttcaaaatgcgatcttcagactggataatattggtcaggatctgcttaacctgatcgatatcggaatcatacgccacgccaataataaattcgttacggcgaactggctcgcgggagaagttaataatatttccggcaataattttaccgttcggaataacgataattttaccgtctgcagtacgcatggtggtggagaaaatctgcacactcagcacagtaccggctacgccgcccaggtcaacatattctccggcacggaacgggcggaacatgacaagtaacacgccagcggccaggttagacagactcccctgcaaagccagaccaacagctaagcctgcggcaccgagtacagcaatgacactcgcggtttgtacacccacgcgtcccagtgcagcgattagcgtaaaggcgataataccgtaacggactaatgcagaaagaaaatcagcaacagtggcatcgattttacgggagatcatcaggcgattcaccgcgttggaaatcatccgcgcgataatcaaaccaacgatgatgatcgcgagtgccgccacgatgtttactgcataacttagcagcagcgcctggttagctaccagccagcttcccgcgccgtttatgctatcgacaacattcaaatcttccattcaatattccttttcaactgactcaaaatggagaaatacactccgccgccttatgacgggcagtctgacaagggtaaacaataaagcataattttgccaaatagatcacagatttctcatctgaatcaccttgcttttggcgaaaaaatccccgcagagcggggctcagacagatatcaatgtgcgctttgtcatgccggatgcggcgtgaacgccttatccggcctacaaaaacctgcaaattcaatatattgcaggatacgtgtaggcctgataagcgtagcgcatcaggcaattttgcttttggcgaaaaaaagacccgcagagcgggccttgagataagcagaaaggaatatcttacagaacgtcgatcgcgttcagttcctggaatgctttctccagacgagcgatcatgctagtctgaccggcacgcagccatacgcgcggatcgtagtatttcttgttcggctgatcttcgcctttcgggttacccagctgaccctgcagataagcttcgttcgctttgtagtagttcagaacgccttcccaggttgcccattgggtatcggtatcgatgttcatttttactacgccgtagcttacggagtctttgatttcctgagcagtagaaccggaaccaccgtggaatacgaagttcaggctgttgtgcggcaggttgtgtttcttggaaacatattcctgagaatcacgcaggatggtcggagtcagaaccacgttacccggcttgtaaacaccgtgtacgttaccgaaggacgctgcgatggtgaaacgcgggctgattttgctcagttcggtgtatgcgtaatcaacgtcttccggctgggtgtacagtgcagaagcgtccatgtggctgttgtccacgccgtcttcttcaccaccggtgcaacccagttcgatttccagagtcatgccgattttggacatgcgctccaggtatttagagcagatttcgatgttctcttgcagagattcttcagacaggtcgatcatgtgagaagagaacagcggcttaccggtagctgcgaagtgtttttcacccgcgtccaacagaccgtcgatccacggcagcagtttcttcgcgcagtggtcagtgtgcaggataaccggaacaccataatgttcagccatctggtgaacgtgatgcgcaccagagatcgcgcccaggatagcagcaccctgcggaacgtcagatttcacgcctttaccagcgataaaggaagcaccaccgttggagaactgaacgataaccggcgctttaactttagcagcggtttccagtacggcgttgatggagtcagtaccgacgcagtttactgctggcagtgcgaagttgttttcttttgctacctggaaaactttctgtacgtcatcaccagtgattacgccaggttttacgaaatcaaaaatcttagacatgtctcttgtcctgtatcgtcgggccttatactcgtcatacttcaagttgcatgtgctgcgtctgcgttcgctcaccccagtcacttacttatgtaagctcctggggattcactctcttgtcgccttcctgcaactcgaattatttagagtatgaaaaattgcgtgctctaaaagcgcgctgaaacaagggcaggtttccctgccctgtgattttttacttcttagcgcgctcttcgagcatcgctactgcaggcagtactttaccttccacgaattcgaggaatgcgccgccgccagtggagatgtaggagattttgtcagcaatgccgaacaggtcgattgctgccagagtgtcgccgccgccagcgatggagaacgcttcgctgtctgcgatagcgttagccacgatttcagtacctttgcggaagttcgggaattcgaacacgccaaccggaccgttccacagaatggttttcgcattcttcaggatttcagccagttcctgagcggaagcatcaccgatatccaggatctgctcgtcagctttcacatcgttaacagatttcagggtagccggtgcagtttcagagaactcggttgctacgcgaacatcagacggaaccgggatgttgcaggtggtcagcagacgtttagcttcgtcaaccaggtcagcttcgtacagggatttacccacatcgtggccttgtgccgcgataaaggtgttagcgataccaccaccaacaatcagctggtcagcgattttagacagggagtccagaacggtcagtttggtagatactttagaaccaccaacgatagccaccatcgggcgagcaggttctttcagtgctttacccagcgcgtccagttcagctgccagcagcgggcctgcgcacgcaacgtcagcgaatttaccgataccgtgagtagaagcctgcgcgcggtgagcagtaccgaatgcgtccattacgaacacgtcacacagtgcagcgtattttttggacagggtttcgtcgtctttcttctcgcctttgttgaagcgaacgttttccagaacaaccagttcaccttcagcaacgtcaacgccgtcgaggtaatctttaaccagacgaaccgggttagacagtttgtctttcaggtagttaacaaccggcagcagagagaattcttcgttgtactcgccttcggtaggacgacccaggtgggaagttaccatcacttttgcgccttgtttcagggccagttcgatggtcggcagagaagcacggatacgcgcgtcgctggttactttcccgtcttttactggtacgttcagatccgcacggataaatacacgtttcccagcaagatccagatcggtcatcttaattacagacatggtgaatcctctcgttgattctaaaagttttgcagacgctgcttgcgtcttacctgaaagcaacagtagccatagctaacgtcgtgtcgagcattcggttagcaaagccccattcgttatcgcaccagaccaacgttttgatcaggtgtgcgccactgacccgggtttgggtgccatcgacaatggcactgtgcggatcgtggttaaaatctacagagaccaacggcaattccgtatagtcaactataccatgaaatgcaccttgtgctgctttttgcagcaacaggttgacttcattggcttttacaggtttcttcaccgtcacgcttaaatcgattgccgtcacatttatggttggcacacgtaccgcaatcgcttcaaagcgatcgttaaattgcggaaaaaatcgtgtgataccggcggccagtttagtatcgaccggaatgatgctctggctggctgcccgggtgcgacgcaggtcaggatggtatgcatcaataacctgttgatcgtgcatggcggagtgaattgtggtcacagtgccggactcaataccgtacgcatcatctaacaatttgatgacgggaattatgcaattcgtggtacaggaagcgttagaaacgatgcggtgttccgcacgaagttgatcctgattgacgccgtaaacaacggtcgcgtcgagatcgttactgccaggatgactaaagagcacttttttggccccggcggcaatatgcgcttcgccatgctcgcgggagccatatacgccggtgcagtcgaggactacatcaacgccaagttcacgccaggggaggctttgcagactacgttcatgcaatacgcggatggcgtcatcaccaacaaaaagttgatcgcgttcctgtcgtacttcccatgcaaaacggccatggctggtgtcatatttcaacaaatgcgccatgcccgcagcatccgccagttcgttgattgccaccacggtaatttccgcccggcgtccggattcatacaaagcacgaaccacattacgcccgatgcgaccgaagccatttatcgctacgcgtacggtcatagatctcctgcaaggttttccctgagcaaatttgccagacagagtaatccagcaaatcgtccggggaaaccttacctgtcgcaaactgcgactgattggttaattgtcgaacatttaatcgactgaaacgcttcagctaggataagcgaaacgtggaataaaaggaatgtttgtccagccgaagaagacatttatctgactcacatcacacttttatccccttttgtgggaagctttattccaggctggcgtaataataaccctacaataactggaataaattgtcagcttgtgaagtgataccggccttcttcagtcatctctactatcagattggcctgacggctattcatcagcacacgctcgacattggggccatcggtgcgggcataaaatgcttcggctacttgccgcgttaatcctcccgcaattttacgactaatcaagcgctcccgcagaatttgagcaggtgcatgaataaaaatagaaaaatcgcagaaagatgccaactccagccacttttcatcatccagtaacaaccagtttccttcgacgatgacgagtggtgcggtaacgtgcaacgcatcttcaacaggatcatgcttttgtcgatcgtactgcggccacgtacaatccccttccacgacctggcgcagattttccgtcagtttcgcaacgtcaaatgtctctggtgcgcctttgaaggggcgcaattgatgcgcatccagccagctattgtaatggtgaaaaccatccatcgggagcgtctgaatagcgggcagttccgggtcttgttgcgcgagatattcccagaaggtggttagggtacttttacccgtccccggcggagcgcaaagaaaaaccaccgtacgccgctgcggatttaccgtctgtaaggccgccaacatgtgcagcaacggtttatgtacattttcaatctcttcgttctggtactgtgcctgtatcttcagcccattcaccgttaattcaattttcacggcgttaattcctttaaggtggtcgttactgccagcgtcagcgccgttttgaccattccgctaaaacgcgcctcactccagacggagaaatcagcgaacttcatcgcttttaacgcgtcatagagcatcgcattgcgggttatgctattgacgttgctgataaaatcccaggtcatgtcatcggcaaatccgggcgtttcatcctgttcgttcaggtaatgccagaactgggaaaaatgcgtgatatcggcgtacaaccatttatccattttcccaacgcataaatcaaacgcagtgcaacatcaatatcgtcaagcgggccgctttgggcgagtaacggcttcactgcatattccacgatctcttcatcgttatcgacaaacaggctcggcagaaactggcgtatcccctggagcaaaatggtatgcgcagttttcataaaactaaataaattgtcctgtgcatccagttgctcaagcacatcatcttctgtcagcgtcgccattggtcttccgatagatcaccatcaatgcagggagtctattatattacacgtttggtccgcgccgccgatcagtaatgtctgcgtccgcaccccattcgccgtctgttggataccgttcaccagctcaccgcccgtcacgcccgtagcgctaaagaggatatcgttccccctcaccagttcatcgaggctgtacacacggttaacgtcaacgcccattgccttgcaacgcttgcgctcctgctctgcaatctgccgattttccgtgtaatcccctttagcctggcaaaagtcaatcagctcggcctgcatatccccgcctaatgctttaacggcacaggcagaaatcacgccttctggcgcaccgccgatggtgtacatcacatcgtaaggattatcctgccagcaggtcagcacgctggcggcgacatcgccatccggcagggcaaaaaccttcacgcccagctgtgttgcttcctcaatcgcggcactcaggcgcggtttatccagcgtaaccatgcgcagcttatccagcggtttgcctaacgctttcgccacgttgcgcaggttgtccgtcagaggcaaagacagatcaatcgcgcccgccgccagccgattaacaaccagctttttcatatacatatcgggcgcatgtaacaggctatctcgaggggcgaaagccatgaccgccagcgcattgctctgccccatcgccaccatccgcgtgccttcaatgggatcaaccgcgatatcgacttctggcccatcgcctttgcccacctcttcgccaatccacagcatcggcgcatggtcaatttctccttcgccgataaccactcgtccacgaaaagcgacgtcgtttaatgcctggcgcatcgcggtgaccgccaggccatcaattttatttttgtcgccacatccggtttgcggccaggcagccaacgctgcctgttccgtaacgcgaaataatggccacgccagggacatcattgcgcggcctccccgatatcaacgccaaattgtgccagcagatatttctcggcctgttcattccagatgccgtgcgtttcctcaaccagccgcgccaactctttaaacagcggatcggttttgcctttttcggcaaaatcggcaatggcagtgagcggcatggtcacgccgttataaatgagttttttaccgccagggatatccggcagattgagcacggtttctggcaccgcatccaggccaccgatatgggtcaccataaagctcggctgtaactgcccagtggcgctaagggcaatcgcctctttcatgtcgtccgtactaccgccagatgtaccgacgacgtgcgtgctgttgtaatggacgttgtagaaattaaacggcactttgaagtttttatccgtcggcccggcaaagaagttcagacagccatcttccgccagtaattcatcagccatctcaacgacagcaggcaccgccgcataaacaaaaatgtcatcgaacccggcatctcctgtcagcgcccgcagcatctggacaggatcgctcatccctttggtattcacatacaccagctcaatgcctttactggccgccagttccaccggcagcagcttctgtacctgcgccagacgtttgtcgtcgatatcgaccaccaccacccggctcggttgtatgccgccgttaatggcgtaatcgatagcgccaatgcccatcggacctgcacacgccagcagtgcaatattgccgccaggtttgacgcccatgcgatgctcataaacatattgcgtggtgtgataattggcatgataagcaccaataatgcagcacataggctctgccaggctcgccgcagcaaaataagagccgtgatacggtaatacgcagcccaaattaatggcgatttcgggaataatcatataagtggcattgccgccaaaatattcgtagctgtagcccgcactatatccgcttggtaaccccatcgccggttgcaatacaaaacgctggccttttttatatttgccagtgagatttttacccacttcgacaataaccccggcacattcatgcccggtaatgaccggatgattttctaaatcgtcgggtacgcgtttatgttcactaccgagtaacgccgctttccaggtgcttaaacagacgctgtcagaaattacactcaccagtaattcattatcggtaatttctggcagttcaaatacgcgcagacggacatcccgcttgccataaatagcagcaactttggttttcatttttacctctgtaatcagtgtttatgttcggcggttaattgattaaataaagtgtcgagttttggatcgccaatatagttattaatcaatatcagtggtttatccgtcacacgtttcacgcgcccttccagactggcatgagtaacgacgatatccgcatccgcaggcacgttttctatggcgtaatgttttacttcaattgccagccccgctttttccaggcgtttacggaaggtggtcgcgcccatcgcactggagcccatccccgcatcgcaaacaaaggcgatacgcttaaccctgcttaagctgaatgcaccctcttgtttcatcgccttaaccgcattggcactctgagcaaactcatcttcgctctccgtttccaccgttttttccatcttcagtatcaggctagtaatagcaaaggacaccagggtacctaccgtaacaccggcaattgtcgccaggaagctgcctttcggcgtcagtgccaggtaagcaaagatagaccccggacttgggccagccaccagaccaccgtccagtaagttaaacatccaggtgccagacataccgcccgcaatcatggcaataatggtcagcggcttcatcagcacatacgggaaatacagttcgtggatcccaccgaggaagtgaataatcatcgccccgggcgcagaacgtttactcatccctttaccaaacaaggtaaacgccagcagcagccccaggcccggacctgggttagaggccaccataaagaagatggatttaccgttaacgctagcctgttgcattcccagcggataatagacgccctgatcgatcgcattattgaggaaaagcactttcgccggttcattgatgacactcaacaatggcagataacccgcatgtaccagcgcctcaatacactctttgacgaaagtattggcaattaacaccgccgggccgataacttcaaaacccagcagacaaaggagcatccccgcgatacctaaactgaagttattgataaccatctcaaaaccggcaggtatgcgtttttccagtgccttatcgacatattttatgaccaacccaccgagcggccccatgatcatactgccaaggaacatcgggatctctgcgccaacgatcacaccaatagtacctattccgcccatgaccgccccgcgtttaccgccgaccagatgaccacctgtagaaccaatcatcacgggcaataaataggtaatcatcgggccgacaattttggcgaaatgttcgttaggcagccaaccggtgggaataaataacgcagtaataaaaccccaggcaataaaagcaccaatattggggatgaccattgcagtcaaaaagcccccaaaagcctggacctttgcacgagcagacttgttttccataatattatcctgtagaggagagagtaattatccgcggctgataatgtccgctaattgtttttcactacttgctgttaagagttgttcgagtatttcttcttcgcacagtaattcacttaacgcctgaatagcgccaatgtggctatcggcatcggcagcagagagtccgatgagtaatttaattggttcgtcattccccggaaaataaacaccttgttcaagtaatgtcaaagacatcccggttttaagcgccccacattccggtcgcgcatgaggcattgccacgcctggtgcgagaatataataagggccattgttaatggtggaatctttaattgcctgaatgtaattctcgctgatatagtttttatccagcaaacttaccatgctgaaatcgatagcttcctgccaatcttttgcactatgtataacactgatactactttctggaaaataatcactaagccgcataaattatccttattttatttttagggtaccgtccggcggtaaaaataaaatactcgtgcggtttaatgaaagcaattgagcagggaaaccggtgttttgaaaacagtgaattattaatttcttatataacattgagttatagatataacaacaaatgtcaatacgcatatcgtgatgcatattacataattgatatttattgcatataaatatttgtgatctacaacacgccttatctattgcttgtccgcaaacggacatatcaaggtaataaaaaaggtcgccgaagcgacctttttacccgaaatgctaattacagcagttcttttgctttcgcaacaacgttatcaacagtgaagccgaactcttcaaacagcagctctgccggagcagattcaccgaaggtggtcataccgacgatagcaccgttcaggccaacatacttgtaccagtagtcagcaatacccgcttctacagcaacgcgtgcagtaaccgctttcggcagtacggattcacggtaagcagcatcctgcttgtcaaatgcgtcggtagacggcatggacaccacgcgcgctttcacgccttcggcagtcagtttttcgtaggcagcaacagccagttcaacttcactaccggtagcgatgaaaatcagttccggctgaccggcgcagtctttcagcacataaccaccgcgcgcgatgtttgccagttgctcttcagttcgttcctgctgcgccaggttctgacgggagaggatcagtgcggtcgggccgtcctgacgctcaacaccgtatttccacgcgaccgcggattcaacctggtcacacggacgccatgtagacatgttcggggttacgcgcagagaagcgacctgctcaaccggctggtgagtcgggccgtcttcgcccagaccgatggagtcgtgggtgtaaaccatcacctgacgctgtctcatcagcgcagccatacgtacggcgttacgtgcgtattccacgaacatcaggaaggtggaggtgtacggcaggaagccaccgtgcagggagataccgttagcaatcgcggtcataccgaactcgcgaacaccgtagtggatgtagttacccgcagcatcttcgttgattgctttagaaccagaccacagggtcaggttagacggcgccaggtcagcagaaccgccgaggaattccggcaacagcggaccgaacgcttcgatagcattctgagacgctttacggctggcgattttcgccggattagcctgcagtttagcgatgaactctttcgctttagcgtcgaagtcagacggcatttcgcctttcatacggcgggtaaattcagcggcttcctgcggataagctttcgcgtaagcagcgaatttctcgttccatgcggattctttcgcctggcctgcttctttcgcatcccactgagcatagatttcagacgggatttcgaacggcgcatatttccagcccagttgttcgcgggtcagggcaatttcagcgtcgcccagcggcgcaccgtgggagtcgtgggtaccggctttgttcggggaaccgaaaccgatgatggttttgcacatcagcagggaaggtttgtcagtcactgcgcgcgcttcttctactgcgcgtttgatagatgccgcgtcatgaccgtcgatgtcgcgaataacgtgccagccgtaagcttcgaaacgcattgcggtgtcgtcggtgaaccagccttcaacgtgaccatcgatagaaataccgttgtcatcgtagaatgcaatcagtttacccagcttcagcgtacccgccagagagcaaacttcgtgggagatgccttccatcatgcagccgtcgcccatgaaggcgtaggtgtagtggtcgacaatgtcgtggcccggacggttaaactgcgccgccagcgttttttctgcaatcgccataccgactgcgttggcaataccctgacccagcggaccggtggtggtttccacaccagcggtgtaacccacttccgggtgacccggagttttagagtgcagctgacggaagtttttcagttcttccatcggcagatcgtaaccggtgaggtgcagcaggctgtagatcagcatggagccgtggccgttggacagcacgaagcggtcacggtcagcccaggacggattctgcgggttgtgtttcaggaaatcacgccacaggacttcggcaatgtcagccatacccataggggcacccgggtgaccggatttggctttctgtactgcgtccatgctcagcgcacgaatagcattggcaagctctttacgactggacattttgactccagatcggatgatgaagggcacgcccttaacgacttgacgacagcgcgttttgggctacgccggaaaatttgccaacaatttaccacaagccgcgcgtcatgtacatggaacatccttttgccgcttcagaaatctctggatcatgctcgcatgttgcgcaatctactcgcccgtccgctgcgcttttccttatactgagactgagcgtcgattcacctgcaaacggcgcatttttagaataatcctgaccttgtgcggaagagaaaacatgaaaattcgcgccttattggtagcaatgagcgtggcaacggtactgactggttgccagaatatggactccaacggactgctcagtagtggagcggaagcttttcaggcttacagtttgagtgatgcgcaggtgaaaaccctgagcgatcaggcatgtcaggagatggacagcaaggcgacgattgcgccagccaatagcgaatacgctaaacgtctgacaactattgccaatgcgctaggcaacaatatcaacggtcagccggtaaattacaaagtgtatatggcgaaggatgtgaacgcctttgcaatggctaacggctgtatccgcgtctatagcgggctgatggatatgatgacggataacgaagtcgaagcggtgatcggtcacgaaatggggcacgtggcgttaggccatgtgaaaaaaggaatgcaggtggcacttggtacaaatgccgtgcgagtagctgcggcctctgcgggcgggattgtcggaagtttatctcaaagtcaacttggtaatctgggcgagaaattagtcaatagccaattctcccagcgccaggaagcagaagccgatgattattcttacgatcttctgcgccaacgcggcatcagcccggcaggtcttgccaccagctttgaaaaactggcaaaactggaagaaggtcgccaaagcagtatgtttgacgaccatcctgcatccgccgaacgcgcccagcatattcgcgatcgcatgagcgcggatgggattaagtaaagcctggtggtgtcgaacgtaggtcagataaggcgttcacgccgcatctgacatgaatggcacatttgttaccttgtgcgcattgccggatgcgatgctggcgcatcttatccggcctacgggtgccgaacgtaggtcggataaggcgttcacgccgcatccgacattaatggcacgttttacccgtgcgcatcgcatctggtgcttactcgccctttttcgccgcctgaatatacagcatttccagcgccagcgttgccgctgccagagcagtgatttcgctctgatcgtatgccggagccacttccactacgtccatcccaacaatgttgagatctttcaggccgcgtaccagtttaatagcgcgatcggaggtcaggccgccaatcactggcgtaccggtgcctggtgcaaaagcaggatccaggcagtcgatatcaaaagtcaggtaaaccggcatatcacccacaatctgtttcacttgggcgataacgtcatccacgctgcgatcgttcacctggcaggcgtccagcacggtaaagccgttgtctttatcaaactcggtacgaataccaatctgcacggaatgattcgggtcgatcagaccttctttcggcgcggtatagaacatagtgccgtggtcaaattcacaaccgttcgcataggtatcggtgtgggcgtcaaagtgtaccagcgccattttgccgaaatgcttcgcatgagcacgcagcagcggcagcgtaacaaagtggtcaccaccgaaagagagcatacgcttaccggcagccagcagcttctcggcgtgcgcctgcagcttttcgctcatctcacgggcatcgccaaaggcatataccagatcgccgcagtccacgacgttcagacgctcacgcatgtcgaaattccacgggaagcggttgtgttcccaggccagattcgtgctaacctgacggatcgctgccggaccgtggcgaccacccgcacgaccagaagtggccatatcgaacggcacgccagtaatcacccagtctgcatcgctgtcatacggctggaagttcatcggcaggcgtaaaaaaccaaaggcattggaaaccagactgttatcgtattgatgacctaaggtgctcatggatggactcctattacaaagtcgatataaaaaaacccttccgcgtcgttaggcccgacgaggaagggttggatttgtcacaataaattgtggcggattatcaccgctaaattaagcggattcaagtaacacaggacttactcatcttcaagataagtataaccgtacaaacctgcctcgaactcttcaaggaactgttgttgcagttcagcatcaagatcggttttcttcacttgatcgcggaactgggttaacagcgttttcggatcgagctgtacatattgcagcatgtccgccacggtatcgccttcgtcagacagttctacttctacgctaccgtcagggaagacgaacacgtcaaccgcttcggtatcaccgaacaggttgtgcatgttgccgaggatctcctgatatgcgccgaccataaagaaaccgagcatcggcggattctctggatcgtactccggcattggcattgtcgtggcaataccgtcaccatcaatatagtggtcgatagcaccgtcagagtcacaggtaatatccagcagcacagcgcgacgttccggcacttgatccagcccttccagcggcagaaccgggaacaactggtcgatcccccatgcgtccggcatgctctggaacaggctgaagttgacgtacattttgtccgccatacgttcctgcagctcgtcgataatcggacgatgagcacggttttgcggatccagctgcttttgcacttcatggcacatgctcaaataaagctgctcagcccatgcacgttcttgcaggctaaagatgccggaagagtagccgatatgaatgtcgtgcagatccatctgactgtcgtgtaaccattcacgcagagaacggcgagttcccggttcgtgcatctcctgccaggtttcccacatgctttgcagcgcgcgcggcgcatcttctgcaggcgcggtcggcaccgtgtattcgttacgttccacgccgatgatattagacaccagcacggtgtgatgcgcagtcaccgcacgaccgctttcggtgattaccgtcggatgcggcagaccgttttcttcacacgcatcgccaatcgcccagataatgttgttggcgtattcattgaggccgtagttcacgctacagtcggactggctacgagtaccttcataatccacgcccagaccgccgccgacgtcgaagcactgaatattgacgcccagcttgtgcagttccacatagaaacgcgcggattcacgaacgcctgtcgcgatatcgcgaatattcgccatctggctaccgaggtggaagtgcagtagttgcaggctgtcgagacgcccggcttcacgcagggtttcaaccagttgcagtacctgagtcgcagccaggccgaacttgcttttttccccgccggaggactgccatttaccgctaccctggctagccagacgtgcacgcacgcccagacgaggaacgacattcagacgttctgcttcatccagcacaatggcgatttcactcatcttctcaatgaccagatagaccttgtgccccatcttctcgccaattaatgccaggcggatatattcgcggtctttataaccgttgcagacgatgacgctacgggtcatgccagcatgtgccagtactgccatcaactcggctttggaaccggcttccagacccagcggttcgccgctatgaatcagggactcaatcacgcggcggtgctggttaactttgatcggataaacaaggaagtaatcgccgttatagccgtaggattccctcgcacgtttgaacgcggcgttaatggaacgcaaacggtgctgcaggatctgtgggaaacagaacagtgcaggcagacgctggccctgtgcttcacgagttttcactaactgcgcgagatcgacgcgagcttccgggacgtccgggtccgggcacacgctaatgtggcccagctcgttaacgtcatagtagttattgccccaccaggcaatattgtaagtacgcagcatcttgctggcttcctgggagctcattgcaacctcctgcatggagcgtagtacaccgtgttcgcccgcactgctaggcaaacccatagacatgtcgtcagacatagcgaacctcaaattattttattaagtgtaaaacagttaacgactatcgcagcctggaactggcttaacaacccataagcacatggattttccagcagactatgctgacgctccaactgcgcaaccggtttctttttcataacattattaagcacataaccgaacgtaagtgtgaaagttcggcgaaaccacgagaaaactcttgtttttacaagagcgcccttgttcagtcctcagtaactgtaaccagctcttgaatcctgagaagcgccgagatgggtataacaagcgcaggtatgcaaagcagagatgcagagtgcggggaacgaatcttcaccagaacggtgagacaggttaagcagcagacaacggttcattatttcgtaagtcctccacggccgcctgttaagacgaacccacaagccaaaactctgattagtacccggctggaagtggcaacacgaaagaaacgtcgtgtgctttttatttaagccgcgcgccgcgttttataccccacaatggcagaaaattgcaaaagataaatacgcagaatgccggcattgtcaggaaaaatttccagccacgtttttaacagaatgagacagctttcaaaaaaaagtggaaatagggtgaagaattgacctaaaatagccatccagatgttaatccatccataccgattaacactcagactgccagtgtttttaacctgcagagtcgtggtaggatccgctaccacagaaaatccacacaacagtttgagctaaccaaattctctttaggtgatattaaatatggcaaaacacctttttacgtccgagtccgtctctgaagggcatcctgacaaaattgctgaccaaatttctgatgccgttttagacgcgatcctcgaacaggatccgaaagcacgcgttgcttgcgaaacctacgtaaaaaccggcatggttttagttggcggcgaaatcaccaccagcgcctgggtagacatcgaagagatcacccgtaacaccgttcgcgaaattggctatgtgcattccgacatgggctttgacgctaactcctgtgcggttctgagcgctatcggcaaacagtctcctgacatcaaccagggcgttgaccgtgccgatccgctggaacagggcgcgggtgaccagggtctgatgtttggctacgcaactaatgaaaccgacgtgctgatgccagcacctatcacctatgcacaccgtctggtacagcgtcaggctgaagtgcgtaaaaacggcactctgccgtggctgcgcccggacgcgaaaagccaggtgacttttcagtatgacgacggcaaaatcgttggtatcgatgctgtcgtgctttccactcagcactctgaagagatcgaccagaaaagcctgcaagaagcggtaatggaagagatcatcaagccaattctgcccgctgaatggctgacttctgccaccaaattcttcatcaacccgaccggtcgtttcgttatcggtggcccaatgggtgactgcggtctgactggtcgtaaaattatcgttgatacctacggcggcatggcgcgtcacggtggcggtgcattctctggtaaagatccaagtaaagtggaccgttccgcagcctacgcagcacgttatgtcgcgaaaaacatcgttgctgctggcctggccgatcgttgtgaaattcaggtttcctacgcaatcggcgtggctgaaccgacctccatcatggtagaaactttcggtactgagaaagtgccttctgaacaactgaccctgctggtacgtgagttcttcgacctgcgcccatacggtctgattcagatgctggatctgctgcacccgatctacaaagaaaccgcagcatacggtcactttggtcgtgaacatttcccgtgggaaaaaaccgacaaagcgcagctgctgcgcgatgctgccggtctgaagtaatctttcttcacctgcgttcaaaggccagcctcgcgctggcctttttcttttggataggcgttcacgccgcatccggcaaaaaaaccgcccgcacaataacatcattcttcctgatcacgtttcaccgcagattatcatcacaactgaaaccgattacaccaaccacaacagacaaagatttgtaatattttcatattattattcggttttcacagttgttacatttcttttcagtaaagtcttaattgcagataacagcgtttaatctatgatgatataactcaattattttcatgcacttaaatcataactaagataaatgttagtgtaagcgattacactgatgtgatttgcttcacatctttttacgtcgtactcacctatcttaattcacaataaaaaataaccatattggagggcatcatgcctgacgctaaaaaacaggggcggagtaacaaggcaatgacgtttttcgtctgcttccttgccgctctggcgggattactctttggcctggatatcggtgtaattgctggcgcactgccgtttattgcagatgaattccagattactagccacacgcaagaatgggtcgtaagctccatgatgttcggtgcggcagtcggtgcggtgggcagcggctggctctcctttaaactcgggcgcaaaaagagcctgatgatcggcgcaattttgtttgttgccggtagcctgttctctgcggctgcgccaaacgttgaagtactgattctttcccgcgttctactggggctggcggtgggtgtggcctcttataccgcaccgctgtacctctctgaaattgcgccggaaaaaattcgtggcagtatgatcagcatgtatcagttgatgatcactatcgggatcctcggtgcttatctttctgataccgccttcagctacaccggtgcatggcgctggatgctgggtgtgattatcatcccggcaattttgctgctgattggtgtcttcttcctgccagacagcccacgttggtttgccgccaaacgccgttttgttgatgccgaacgcgtgctgctacgcctgcgtgacaccagcgcggaagcgaaacgcgaactggatgaaatccgtgaaagtttgcaggttaaacagagtggctgggcgctgtttaaagagaacagcaacttccgccgcgcggtgttccttggcgtactgttgcaggtaatgcagcaattcaccgggatgaacgtcatcatgtattacgcgccgaaaatcttcgaactggcgggttataccaacactaccgagcaaatgtgggggaccgtgattgtcggcctgaccaacgtacttgccacctttatcgcaatcggccttgttgaccgctggggacgtaaaccaacgctaacgctgggcttcctggtgatggctgctggcatgggcgtactcggtacaatgatgcatatcggtattcactctccgagcgcgcagtatttcgccatcgccatgctgctgatgtttattgtcggttttgccatgagtgccggtccgctgatttgggtactgtgctccgaaattcagccgctgaaaggccgcgattttggcatcacctgctccactgccaccaactggattgccaacatgatcgttggcgcaacgttcctgaccatgctcaacacgctgggtaacgccaacaccttctgggtgtatgcggctctgaacgtactgtttatcctgctgacattgtggctggtaccggaaaccaaacacgttagcctggaacatattgaacgtaatctgatgaaaggtcgtaaactgcgcgaaataggcgctcacgattaatctccccaagcttcctcccatcgcggaggaagccacctcttgcagtcatcttttcttcgctctatcctctgccgctatgaaaacatcccgtctccctatcgccatccaacaggccgttatgcgtcgcctgcgggaaaaactcgcccaggccaacctgaagctagggcgtaactacccggagccaaaactctcttacacccagcgcggaacctccgccggaacggcctggctggaaagctatgaaattcgcctcaatcccgttttgctgttggaaaacagtgaagcttttattgaagaagtggtaccgcacgaactggcacatttgctggtatggaaacatttcggccgcgtagcgccacatggcaaagagtggaagtggatgatggaaaacgtgctgggtgttcccgcccgtcgtacgcatcagttcgaactgcaatccgtgcgtcgcaacaccttcccctaccgctgcaagtgccaggagcatcagcttaccgtacgccgccataatcgcgtagttcgtggcgaggccgtctatcgctgtgttcactgcggtgaacagctggttgcgaaataaccatctgaactatcaggaactttcctgatttggctgattgcataccaaaacagctttcgctacgttgctggctcgttttaacacggagaagtgcctacactagcgggattctttttgttaacccctaccccacgcgtacaaccgcgtggggagacgacgcggatttttaactatgcgtatcccccgcatttatcatcctgaaccactgaccagccattctcacatcgcgctttgcgaagatgccgccaaccatatcgggcgcgtactgcgcatggggccggggcaggcgttgcaattgtttgacggtagcaaccaggtctttgacgccgaaattaccagcgccggcaaaaaaagcgtggaagtgaaggtgctggaaggccagatcgacgatcgcgaatctccgctgcatattcacctcggtcaggtgatgagccgtggtgaaaaaatggaatttactatccagaaaagcatcgaactcggtgtaagcctcattacgccacttttttctgagcgctgcggcgttaaactggatagtgaacgtctgaacaagaagcttcagcagtggcagaagattgcaattgctgcctgtgagcagtgtggtcgtaaccgggtgccggaaatccgtccagcgatggatctggaagcctggtgtgcagagcaggatgaaggactgaaactgaatcttcacccgcgcgccagtaacagcatcaatacgttgccgttaccggttgaacgcgtccgcctgctgattggcccggaaggcggtttaagcgcagatgaaattgccatgactgcccgctatcaatttactgatatcctgttgggacctcgcgttttgcgtacagagacaactgcgctcaccgccattaccgcgctacaagtacgatttggcgatttgggctaacggagaagaataatgatcaagctcggcatcgtgatggaccccatcgcaaacatcaacatcaagaaagattccagttttgctatgttgctggaagcacagcgtcgtggttacgaacttcactatatggagatgggcgatctgtatctgatcaatggtgaagcccgcgcccatacccgcacgctgaacgtgaagcagaactacgaagagtggtttagcttcgtcggtgaacaggatctgccgctggccgatctcgatgtgatcctgatgcgtaaagacccgccgtttgataccgagtttatctacgcgacctatattctggaacgtgccgaagagaaagggacgctgatcgttaacaagccgcagagcctgcgcgactgtaacgagaaactgtttaccgcctggttctctgacttaacgccagaaacgctggttacgcgcaataaagcgcagctaaaagcgttctgggagaaacacagcgacatcattcttaagccgctggacggtatgggcggcgcgagcattttccgcgtgaaagaaggcgatccaaacctcggcgtgattgccgaaaccctgactgagcatggcactcgctactgcatggcgcaaaattacctgccagccattaaagatggcgacaaacgcgtgctggtggtggatggcgagccggtaccgtactgcctggcgcgtattccgcaggggggcgaaacccgtggcaatctggctgccggtggtcgcggtgaacctcgtccgctgacggaaagtgactggaaaatcgcccgtcagatcgggccgacgctgaaagaaaaagggctgatttttgttggtctggatatcatcggcgaccgtctgactgaaattaacgtcaccagcccaacctgtattcgtgagattgaagcagagtttccggtgagcatcaccggaatgttaatggatgccatcgaagcacgtttacagcagcagtaacccaccttagcgagaaggatctcgttgagactctgagtgacagcgcccttctttccacgcatactgggcgctgttgcttttttgaaccaggaaacagaacctctgacaatgaatttacagcatcactttcttattgccatgcctgctctccaggatccgattttccgtcgttccgtggtctacatttgcgaacataataccaatggtgcaatggggatcatcgtcaacaagccgctggaaaatctcaaaattgaagggattctggaaaagctgaagatcacgccggagccgcgtgatgaaagtatccgtctggataaaccggttatgctcggcggtccgctggctgaagatcgcgggtttattttgcatactccgccctccaattttgcttccagcattcgcattagtgacaacacggtaatgaccacttcccgcgatgtgctggaaacgctcggcaccgataaacaaccgtctgacgtattggtggctctgggttatgcctcctgggagaaaggtcaactggaacaagaaattctcgataacgcgtggctaacggccccggcagatctgaatattctgttcaaaacgccgattgccgaccgctggcgcgaggcggcaaaactgattggtgtggatattctcaccatgcctggtgtggcaggacacgcctgatgagtggaaccttactcgccttcgacttcggcaccaaaagcattggcgtagcggtcggccaacgcattaccggcaccgctcgccctttgcctgcaattaaagcacaggacggtacgccggactggaacattatcgagcgtttactgaaagagtggcagccggacgaaatcatcgtcggtttgccgctgaatatggacggcaccgagcaaccattgactgccagagcgcgtaaatttgccaaccgtattcatggccgtttcggtgttgaagtaaagctccatgacgagcgtcttagcactgtggaagcccgttccggtctgtttgaacagggcggctatcgggcgctcaacaaaggcaaagttgactctgcctctgcggttattattctcgaaagctatttcgagcagggatattaaggcgatttaaacgcctggcggagtgtaaataatatcatcgcgtcttattgccggatgcggcgtgaacaccttatccagcacacatctggcagcggctataggtctgataagacgcgttagcgtcgcatcagacatttattgcctttgtaggcccgataagcttgcgcatcgggcatggcaacgtcacaaacgcccttcccccacccggtgctgataactctgctgaaacgttatcatccccacctgctgcccggtttgaataacatgcggtaactggtgggttttcccttcgcgaatcaaattccccaccgcgggtgtgttaatcagcaattcaaatagcgccacgcgtccttcctgtttatccacttccagcttttgactcagcactgcccgtaaactacctgccagttgattacgcacggggtctttttcctgcgccggaaaactatccaccagtcgctcaactgcctgcgcggcaccacgcgtatgtaatgttgccagcaccaaatgcccggtttctgccgccgtcagtgccagacggattgtctcgctgtcacgcagctctccgagcaaaatcacatcaggatcttcccgcaatgcggcccgcaatccgcttgcgaacgtcatacagtgcaaaccaatttcccgctgctggatcaaacatcgctggctggcatagagatattcaacaggatcttccagcgtcagaatatgcgcatcggcatgttgattgagatagccaaccatcgccgccagcgtggtagatttgccactccccgtcgcccccgtcaccagaatcaggccattctcgctcttgagtaattccggcaataccgttggtgcgccaagctgttcgagctgcgggcagtggctaggtaacagccgtaacgccaggctaatgccatgccgttgcgcgaatgcgctgccacgcaatcgctggttttccgccaggctcacggcaaaatccagctgaccattctccagcaatattgcccgctgatcgtcatccagccactcccgcagtagctcttcgacgtccggcgtatcaaacggcgcagcttccattctgccgcgaatgcgccatcgtgcgggccaggcgctgcacaggtgtagatcgctgacgttatgctttacactaagggccacaatttcttccatattcatactaagatcctcggaaaatgaacgatattgcgcataacctggcacaggtccgggacaaaatcagtgcggctgcaacgcgttgcggccgttctccagaagaaattacgctgcttgcagtcagtaaaacaaaacctgcgagcgccatcgcagaagccattgatgccgggcagcgtcaatttggtgaaaactacgttcaggaaggggtagataaaattcgccactttcaggaactgggcgtaacaggattagaatggcattttattggcccgttgcagtctaataaaagccgcctggtggcagagcatttcgactggtgtcataccatcgaccgtttgcgcatcgctacccgtctcaacgaccagcgcccggcagaacttccccctcttaacgttctgattcaaattaacattagtgatgaaaacagtaagtccgggattcaactggctgaactggacgagctggcagctgcggtcgctgaactaccgcgtttacgtctgcgcgggttgatggcaatccctgcgcctgagagtgaatatgtaaggcagtttgaagttgcacgccaaatggctgtagcatttgccggactgaaaacgcgctacccgcatatcgacacgctctctctgggaatgagcgacgatatggaagccgccattgcggcaggtagcacgatggttcgtatcggcactgcaatttttggtgcgcgtgattactctaaaaaataaggaattaaaggaacgccatgaatacgttgactttcctgcttagtacggtcattgagctgtataccatggtgctgttattacgcatctggatgcagtgggctcattgtgatttttacaaccccttcagtcagtttgtagtgaaggtaacgcagccaattatcgggccactgcgccgcgttattccggcaatggggccaattgacagcgccagcctgctggttgcctatattctcagttttatcaaagccatcgtgctgtttaaagtggtgaccttcctgccaatcatctggattgccggtttactgattctgctgaaaaccatcggcctgctgattttctgggtcctgctggtgatggcgattatgagctgggtaagccaggggcgtagcccgattgaatacgtgctgattcagctggccgatccgctgctgcgcccgattcgccgcctgctaccggcaatgggtgggattgatttcagcccgatgatcctcgttctgctgctgtatgtcatcaatatgggtgtcgcagaagtattacaggcaaccggaaatatgctgctgccagggctgtggatggcgttatgaatgccgtaacagttaatgatgacggtctggttttacggctctatattcagccgaaagccagccgtgattctattgtcggtttacatggcgacgaagttaaagtcgccattaccgcgccgccggttgacggccaggccaacagtcatctggtgaagtttctcggtaagcaattccgggttgccaaaagccaggtggtgattgaaaaaggcgaacttggccgccacaaacaaattaaaatcattaatccgcaacaaatcccgccagaaatcgcggcgttaattaattaagtatcctatgcaaaaagttgtcctcgcaaccggcaatgtcggtaaagtgcgtgagctggcgagcctgcttagcgacttcggtcttgatatcgtggcccaaacagacctcggcgttgattccgctgaagaaaccggcctgacctttatcgaaaacgcgattctgaaagcgcgccatgcggcaaaagtgaccgctttaccggcaattgccgacgactctggtctggcggtagatgtgcttggcggcgcgccgggcatttactccgcgcgttattccggtgaagacgcgaccgatcaaaagaatctgcaaaaactgctggaaacaatgaaagacgtaccggacgaccaacgtcaggcgcgtttccactgcgtgctggtatatctgcgtcacgcggaagatcccactccgctggtatgccacggtagctggccgggcgtgattactcgtgaaccagcgggcactggtggctttggttatgatccaatcttcttcgtaccttccgaagggaaaaccgccgccgaactgacccgcgaagaaaagagcgccatttcccaccgtggtcaggcgttgaaactgctgctggacgctttacgtaatggttaaattacctccgctgagtctctacattcacatcccgtggtgcgtgcagaaatgcccgtactgcgatttcaactctcacgcgttgaaaggagaagtgccgcacgacgattatgttcagcatctgcttaacgatctggacaacgatgtggcttacgctcagggccgtgaagtaaagacaatctttattggcggtggtacgccgagcctgctttccggcccggcgatgcaaacgctgctggacggcgtgcgtgcgcgtttgccgctggcagcggatgcagaaattactatggaagcgaaccctggcacggtagaagccgatcgctttgtcgattatcagcgtgctggtgtgaaccgcatctctattggtgtgcagagttttagcgaagaaaagctgaaacgacttgggcgtattcatggcccgcaagaagcgaaacgcgcggcgaagctggcgagcggtttagggttacgtagctttaaccttgatttgatgcatgggctgccggatcaaagtctggaagaggcgcttggcgatctacgccaggccattgaactgaatccgccgcatctttcctggtatcaactgaccatcgaacccaatacgctgtttggtagccgaccaccggtgctgccggacgatgacgcgttgtgggatatattcgaacaggggcatcagttattaaccgcagcgggttatcagcaatatgaaacttccgcttacgccaaacccggttatcagtgccagcacaatctcaactactggcgctttggtgactacatcggtattggctgcggcgcacacggcaaagtgaccttcccggatgggcgcattctgcgtaccaccaaaacgcgtcatccgcgtggttttatgcaaggaaggtatctggaaagccagcgtgatgtcgaagccacagataagccgtttgagttctttatgaatcgcttccgtctgctggaggccgcgccgcgcgtggagtttattgcgtataccgggctttgcgaagatgtgattcgcccacagttagacgaggcgattgcccagggttatctcaccgaatgtgcggattactggcagataacggaacatgggaagctgtttttaaatagcctgctggagctttttctggctgagtaaacttgtattgccggatgcggcgtgaacgccttatccagccgacatgtggcagcggttgtaggtctgataagacgcgcaagcgtcgcatcagacgttgattgccggatgcggggtcaacgccgcatcctgctacaaatcgtgcactatatcaaacttacttaatcaccccattgcgccgcagttgttcggtatcttttttccagcgttcattagcttggttgatatcgtcaattttcatcaaaatcgcgacttttttactgtttatttcactaactttcatcgttaacggatattgccctttttcgagcgttacccagtcatcctgcaatttacggctaagtttttgactttgcagaaaagtctgtcgccgttgttcgttgatatcgaaatctcgtttctgctgaatcggcacttcataacactcttcactctgtttatgacatgccgcaatcgccggttgataaacctctttgtcatatttaaccgcgaacgcctcgctatcgttctgtttattaaactcatcacgctgttggtgaatttttttaaaggcgtcttcgcgggtcatttgcttaccgtttgcatcttttccccaatatgcatccgctgctttctgcgccgccaccatttgcttatcaagcgctttcacttccttttccagcgcaggaatgctgttcttctgggtattcaacgcagattcaagctgactaaagcgataattgaaatcttcgctattcacgatcagatatttattattcgttttgatatcgtcgaccacccgcccacgatcgctggctgccgcctgaaaagagtaaaagttcacgctccagccagacgcgggcgttcctttactggttaacatcgcgctgaattttaccggtttatctttcgtccaggtctgttcgagcagttcgtaatctgccaactgaccgacccaggtatagagatcgtcactggaagagacatcgccttccgcactccaggtggcctgattacccttagcatcaagattttttaaggtgatagcatcaagcttgagaatgccgtgatactgctttttgaattgatcttttaagatattttcagttggcggttcgccatctgcccaggcattaccagtcatcaacataagcagtgccgtgccaacaatccattgctttttcacccgaaaaacctcacgcggaataatttattccggtgattatcattagggtaattaaaattggcaatggacgtgagtctgaagtgaaaaagccccggcacgataccggggcgaggcgattagtactgattgaagatctgctggatctgctgcggatctttggtttgcgtcagagccagttgcagcagaacgcgcgctttttgcgggttcagcgtgccagaggcgacgaagccgtatttcgcatcatccacttcggcatcctgagtggtagcgcccgtcggtacgcgggaagaacgcacgactgcagtaccggttttcgcggcggtcgccagcgtgtcgaacacagatttatacaggttgccgttacccacaccagcgctaacgatgccatcatagcccgcatctaccagtgctttagccggaagatcggatgcgttagcgtagttataaacaatgccgactttcggcagttcattcagcttagagacatcgaatggcgtgtcgctggtatgcttacgtgccggggtacgctggtagtcaatcttaccgttgtgaatgtaacccagaggaccgtagttaacagacttgaaggtcgctacgtcggtggtgttggttttggtgacgtcacggccatcaagcacggtgtcattcatcactaccagcacgccacggttggcggaggctttatcagctgcggtcactaccgcgttatacaggttgaatggaccgtctgcgctcatagacgtggacggacgcattgcgccgaccatcaccaccggtttgtcgcatttcaccgtcaggtcgaggaagtaagcagtttcttccatcgtgtcggtaccgtgggtaatgacgaagccgtcggtcttatcgcagtcggtgttaatttttttcgccagtgtcagccagacattatcgttcatgtcctgggagccgatattcactacctgctcgcctttaacgttcgcaatgtcttttagttgcggcaccgcattaaccagattttctacgccaactttacccactgtgtagttagatttggttgcggagtcaccaccaccggcaatggtcccgccggttgctaaaatggtgatattgggtaatgccaatgctgcaccactaaaacccataaccagtgcggcaagtgccgtctttttgaaaaactccatttcattcctccagttacgtgaacgctacgcattatcccttagctctgtatgggaaatttgacgttaaacaatttacaacgtgaatatattttggagatctacaaagttagaggcaggtaacaaaacgaagaattaaacggcataaaaaagtattatgccgtcttaaaatagaggattattttaaattcccgaccagggctttgcggctatcttccagagtcacaacgcggctacaaacatctttgccaaactgctggaaatctttttcctgctttttccactcggtttggatactggattgcagcccccccaggcttcccagcacattctgtaatgggttaccgccgctttttcagcaccgctttcgcgcccatttcattaatgctgtcctgtaaaattccacccattgcctgattcactaattgctggccttcggcgcgaacctgatcaatggctttatagtgaaacgtcaggccatcgctgcgcgtttcaataatgcggttcatctgctctttcagctgcgcatcaagtttggtcagacggctgcgcattttgctgctttcgcccatctcctgaacgataattttatccagagcaatacgggctttctcgacgcggcttttcgcgccttcatcaatccacggcagcgtgctgcgtagttcagcctgataatccttcgcctgctcgcgctgggcggcattcagggaatattgcttaccgttatacatcacgttgccgtctggcgtgatcaccagattgccgttttcgcccttcacctgcacggtttgcgggctgacaatcacatcgtcacgcggcgtgacgctgcactggtagtcggcgtgagcggtcattgccgtcacactaagtgctgccgccagcagcattttgcgcatcatagtcttccctcaagaaaaaatcaggccagcatttgctggccccagattgataacaaagtacgcgttttccatgccggatgcggcgtaaacaccttatcccgcctactcgatcgtgcatctttccaggcctgataagcgtagcgcatcaggcagttttgcatttgtcatcgcccgtatgctttcttagtcccaccaaacgtcgaaaagttcgctggtgcgtacctcatccagtttgcgctcttccagccacttacgcacaatcgcctgatgttcttcggtgcatttgccgatttcctgcatgcagatcagaccttcccaggccagataaccgctgccgtcaaaggccagtttgttcggttcgataacctcgttaataaaatcatcaacggttttatcaatctgttcttcgcttgtaccttccgggaatcgccatgccacgctaaatcctaattcctggaattcgtcgatgtgcatttttttacgcagacgacggctacggttctttgccattatttcaccctctcgaacattaagtcccatactccgtgaccaagacgatgaccacgttgttcaaatttcgtcaccggacgacttgccggacgcggtacgtaatcattgctctcactcaggtttttataaccgtcaatagaagacatcacttcaagcatatgttccgcataaggttcccagtcggtcgccatatggaatacgccccccagctgcagtttgctttttaccagttcggcaaacggcacctgaacgatacggcgtttattatggcgcgctttgtgccacgggtcagggaaaaagagctgcaccatgcgcaaactattgtcaggaatcattttatgcagcacttcaaccgcatcgtgacacatcacgcgcaggttgcttaaaccttcttcatgcgcagaagccaggcacgcaccaacgcccggactatgcacttcaatgccgaggaagtcctgctcagggcgatctttagccattgccaccaggctcgcccccatgccaaaaccaatctcaagcgtcaccggcgcttcacggccaaaaagcgcggggaaatccagcatatcttcgctgaactcaacgcccatcaccggccagtagttttccagcgcatgttcctggcctttggtcagtcgcccctggcggcgcacaaaactacggatacggcgcagtgggcggccgttttcatcaaattccggactaatgacgtcgtttttcataaaggtttagtcgcttgtgaaagtgttctgaaaacgggcattatccaaagttagttgccggatgcaagcatgataaggccgtggctgcggaaagttccggtttacaccctgccgtcgctgtgctgcaatcttgcccccaacaacagtgaattcggtgaccatgcaagcgagccaatttagtgcccaggttctggactggtacgataaatacgggcgaaaaactctgccctggcaaattgacaagacgccctacaaagtatggctcagtgaagtgatgttgcaacaaactcaggttgcgaccgttatcccctattttgaacgctttatggcgcgcttcccgacggtgaccgatctcgccaatgcgccgctcgacgaagttctccacttgtggaccgggcttggctattacgcccgcgcgcgcaatctgcataaagcggcacaacaagtggcgaccttacacggcggtaaattcccggaaacctttgaggaagttgcagcactgccgggcgtcgggcgttccaccgcaggcgcgattctcagcctttctctgggtaagcactttccgattctcgacggtaacgtcaaacgcgtgctggcgcgctgctatgctgtaagcggctggcctgggaaaaaagaggtcgagaataaattatggagtttgagcgagcaggtgacgcccgcggttggcgtggaacggtttaatcaggcgatgatggatttgggtgcgatgatttgtacgcgcagcaaaccgaaatgtagcctctgtccgctacaaaacggatgtattgccgccgccaacaatagctgggcgctttatccgggcaaaaaaccgaaacagacgctgccggagcgcaccggctactttttgctattacagcacgaagatgaagtattgctggcgcagcgtccgccgagcggattgtggggcggtttatactgtttcccgcagtttgccgacgaagaaagtttgcggcagtggctggcgcaacggcagattgctgccgataacctgacgcaactgaccgcgtttcggcataccttcagccatttccacttagatattgtgcctatgtggcttcccgtgagcagtttcaccggctgcatggatgaaggcaatgcgctctggtataacttagcgcaaccgccgagtgttggcctagcggctcccgtggagcgtttgttacagcagttacgcactggcgcgccggtttaacgcgtgagtcgataaagaggatgatttatgagcagaacgattttttgtactttcctgcaacgtgaagcagaaggtcaggattttcagctgtaccccggcgagctgggaaaacgcatctataacgagatctccaaagaagcctgggcgcagtggcagcacaagcaaaccatgctgattaatgaaaagaaactcaacatgatgaatgccgagcaccgcaagctgcttgagcaggagatggtcaacttcctgttcgagggtaaagaggtgcatatcgagggctatacgccggaagataaaaaataaaaacagtgccggagcacgcctccggcaacttgcataaaaacaaacacaacacgcacccggaatgatgaaaaaatatctcgcgctggctttgattgcgccgttgctcatctcctgtagcacgaccaaaaaaggcgatacctataacgaagcctgggtcaaagataccaacggttttgatattctgatggggcaatttgcccacaatattgagaacatctggggcttcaaagaggtggtgatcgctggtcctaaggactacgtgaaatacaccgatcaatatcagacccgcagccacatcaacttcgatgacggtacgattactatcgaaaccatcgccgggacagaacctgccgcgcatttgcgccgggcaattatcaaaacgttattgatgggtgacgatccgagtagcgtcgatctctattccgacgttgatgatattacgattagcaaagaacctttcctttacggtcaggtggtggacaacaccgggcagccgattcgctgggaaggtcgcgcaagcaacttcgcggattatctgctgaaaaaccgtctgaagagccgcagcaacgggctgcgtatcatctacagcgtcaccattaacatggtgccgaaccaccttgataaacgtgcgcacaaatatctcggcatggtccgccaggcgagtcggaaatatggcgttgatgagagcctgattctggcaattatgcagaccgaatcttcctttaacccgtatgcggtcagccgttccgatgcgctgggattaatgcaggtggtacaacatactgccgggaaagatgtgttccgcagccaggggaaatccggcacgccgagccgcagtttcttgtttgatcctgccagcaatattgataccggcaccgcgtatctggcgatgctgaacaatgtttatctcggcggaattgataacccaacaagccggcgttatgccgtcatcaccgcctataacggcggcgcaggcagcgtgctgcgagtctttagcaatgataagattcaggctgccaatattattaacaccatgacgccgggcgatgtttatcagacgctgacgacccgccatccctctgcggaatctcgccgttatctttataaagtgaataccgcgcaaaaatcctaccgccgccgataattccattaaccgcccctgacgatgctcaggggcaaaaatgttatccacatcacaatttcgttttgcaaattgggaatgtttgcaattatttgccacaggtaacaaaaaaccagtccgcgaagttgatagaatcccatcatctcgcacggtcaaatgtgctttttcaaacactcatccgcatcacgatgtgaggaaattaacatgaatcttaagctgcagctgaaaatcctctcttttctgcagttctgtctgtggggaagttggctgacgaccctcggctcctatatgtttgttaccctgaagtttgacggtgcttctattggcgcagtttatagcagtctgggtatcgcagcggtctttatgcctgcgctgctggggattgtggccgacaaatggttaagtgcgaaatgggtatatgccatttgccacaccattggcgctatcacgctgttcatggcggcacaggtcacgacaccggaagcgatgttccttgtgatattgattaacagctttgcttatatgccaacgcttgggttaatcaacaccatctcttactatcgcctgcaaaatgccgggatggatatcgttactgacttcccgccaatccgtatctggggcaccatcggctttatcatggcaatgtgggtggtgagcctgtctggcttcgaattaagccacatgcagctgtatattggcgcagcactttccgccattctggttctgtttaccctgactctgccgcatattccggttgctaaacagcaagcgaatcagagctggacaaccctgctgggcctcgatgcattcgcgctgtttaaaaacaagcgtatggcaatcttctttatcttcagtatgctgctgggcgcggaactgcagattaccaacatgttcggtaataccttcctgcacagcttcgacaaagatccgatgtttgccagcagctttattgtgcagcatgcgagtatcatcatgagcattagccagatctctgaaaccctgttcattctgaccatcccgttcttcttaagccgctacggtattaagaacgtaatgatgatcagtattgtggcgtggatcctgcgttttgcgctgtttgcttacggcgacccgactccgttcggtactgtactgctggtactgagcatgatcgtttacggttgcgcattcgacttcttcaacatctctggtagcgtgtttgtcgaaaaagaagttagcccggcaattcgcgccagtgcacaagggatgttcctgatgatgactaacggcttcggctgtatcctcggcggcatcgtgagcggtaaagttgttgagatgtacacccaaaacggcattaccgactggcagaccgtatggttgattttcgctggttactccgtggttctggccttcgcgttcatggcgatgttcaaatataaacacgttcgtgtcccgacaggcacacagacggttagccactaattacgcaaagaaaaacgggtcgccagaaggtgacccgttttttttattcttacttcaacacataaccgtacaaccgtttcacgccatccgcatcggtttcgctataaacaccttgcagctccgggctaaatcccggcaacaaattcaccccttcttccagtgcaaggaaataacgttgaaccgccccaccccagacttccccgggtaccacgcaaagcacgccaggtggataaggcaacgccccttctgccgcaattcgcccttcggcatcacgaatccgcaccaactccacgtcaccgcgaatataagcgctatgcgcatcctgggggttcatcaccacactcgggaaactctgctggcggaacatcgctttttgtaggtctttgacgtcgaaactgacatacagatcgtgcatctcctgacacaactggcgcagggtgtagtcgcgatagcgcaccggatacttgttataaacgctcggcaacacctcaaccagcgggctgtcatcctcaatatgctgttcaaattgcgccagcatcgccaccagttgtgccagcttctcgtggctttccgccggagttaataaaaacagaatggagttgagatcgcacttctccggcacaatgccgttctcacgcagatagtgcgccagaatcgtcgccggaacgccaaagtcgctatattcgccggtttcggcatcgatacctggtgtagtgagtaacagcttgcacggatcaacaaaatactgatccgcggcatatccttcaaagccgtgccacttcgcccccggctcaaaactgaaaaaacggcggtcgctggctaacacacttgtcggataatcctgccacaatttgccatcaacaacgggcgggataaacgggcggaacagcttacagcgcgcaagaatagccttgcgcgcttcaatccctatctcaacacactcagcccacagccgacgcccactctccccttcatgaattttggcgttaacatccagtgcagcaaacagcggatagaaagggctggtagaagcatggagcataaaggcgttattcaaccgcttatgcgggcaaaaacgcgcctgtccgcggatatggttatcttttttatggatctggctcgtctgactgaatcccgcctgctgtttgtgcacgctctgagtcacaaagatccccggatcgttttcgttaagttctaacagcagcgggctgctatccgccatcatcgggataaattgttcataaccgacccacgcggaatcaaacagaatgtaatcacacagatgcccaacggtatcgatcacctgacgggcgttatagacagtgccgtcataggttcccagctgaataatcgccaggcgatacgggcgcggcaggtcggctttttctggcgcaacgtcgcgaatttgctggcgcagatactcttcattaaaacagtgcgcatcaataccgccaatgaaaccaaacgggttgcgactagcttccagatagaccggcgtcgcccccgcctgaatcagcgcgccgtgatgattgctcttatggttgttacggtcgaagagcaccagatcgccacgcgttaacagcgcattcgtcaccactttattcgctgcgcttgtgccgttcagcacaaaataggttttatcggcatgaaagactttggctgcgaatttctgcgcatctttcgcgcttccttcatgaataagcagatcgcccaattttacgtcagcgttacacatatcggcgcgaaagacgttctcaccaaagaaatcgtaaaaatggcgtccggcaggatgctttttaaaaaacgcaccatgttgatgtccagggcaagcaaaggtgctgttgcccatctcaacgtactgcgtcagcgtgtcataaaacggtggcagcaaattctcttcatactgacaggctgcggattccagctccagccactgctgctcgttgccgttgattaccgccgtaacgcccgcaggtaattcaacagcatgttcggaatacaaaaacaccggtagatgaaaaccggtgcgcttaagcaacgcaagaatgccactgcgactatccgcagcggtaatgacgactgccgcgacgtccgtaaaatcagtatctcccaacgccaccacgcgacgatgagaagaaagtcgggataccagttcactactggcggcaatattcatacttttcataagcgcaaacccgtttcggggaagtaagaataccggacaaggtggaaaaccctgccccatgagatatgggtcaaactggtcaccagctccgaccgccagacatcagtaaaagcagaaacgctctgattttactgttgtcctgcagtgagcgtgcgttaacttcaccgcatgagcagtaacatagaaagggaaacgtttcgcgcgaaacggcgataagcgagagaatgtaaggagatggcgtgcatcgggcaaactccgtacagagaggagaaaattcgcgcaatcatggcacctttcgctaaagcgtgcaagccaggactttgcgaacaaacaagccatcgacggcaccaaacggtcataataagaaaatcaaacaatacagctaacaggaactcttgtggtcatcggcccttttatcaacgctagtgcagtcttactgggtggcgttctcggcgcactgctcagccaacgcttaccggaacgtatccgcgtctccatgacaagtatttttggtctggcaagcctggggattggtattttactggtggtgaaatgtgccaaccttccagcgatggttttagctacgctacttggcgctctaattggcgaaatttgtttgctggagaaaggtgtcaatacagcagtcgccaaagcacaaaatctgtttcgtcacagtcgtaagaagccagcgcatgaatcttttattcagaattatgtcgcgattattgtcctgttttgcgccagcggcaccgggatcttcggggcgatgaacgaagggatgaccggcgatccgagtattttaatcgccaagagttttcttgatttctttacggcgatgatcttcgcctgcagcctgggtattgcggtaagcgtgattagtatcccattactgatcatccagttaacgctggcgtgggctgccgcgctgattttaccgctgaccacaccgagcatgatggcagacttcagcgccgtaggcggtttattgctgctggcaaccggattacgcatctgtggcattaaaatgttcccggtggtcaacatgcttccagcactccttctggcaatgccgctttccgccgcctggaccgcctggtttgcctgacaatgcgtgcaatatcggcaaagtgatgatagattgtgcagtctgcagtaaattgaagaaatttgattgacgagacgaggcgaatcaggtttaatgcgccccgttgcccggatagctcagtcggtagagcaggggattgaaaatccccgtgtccttggttcgattccgagtccgggcaccactaattcttaagaacccgcccacaaggcgggtttttgcttttggatctgacaataaccttcacgaaaaaaattagcttataaagtctgggggaattactctcgccacgttaacgagagtaattttattgatattaatctcctgatactttacccccgtccaaactccagccgctgcacattcaccatcccaggcttctcagcagcactgacatcaatttgtgtcacccgcagcgcatagaacgccattttgaatttacgaacggacgcattatcagtgactttaacggcatgggcaaagtgaaatatcattttttaacgataaaaagagtgttatttcttgtgtatcagacaataagcattcattcaaaacctttagaaataatcaaaacacaggtattccactggttaatatattcacatatgaaatgaataaatattggaatatataaatattgaatattttgattaatccccgtactgattattcttcataatcagtacggggttgctacaacatgtattactttttcaccacaattaacggttcaatatcactctcttttttgatgaccagactttcatcaccgcgcaaacacgtcccaccgtagttgccgccaacggtgaaggtacatacctgaatgtatttaccgtccactttcggcaaacaccacagttgctgatagatgtttttctgctcggcaaatttaccgctggttttgtccagcacctcttcatgatggctgacgaggtcgatattgctgccacagcgaccggcgatcggtttcactgcgtaacctgttttcaccagttcatcattaacagtgaaatcggtatccagcaggtaacgatggtgcgggaacaggctccagaggatcggcagaatcgctttgttgccggggatcaccgtccacagcggctcaaagaccagcacttccgggcgcagcaatacgtcgataagacgcacttcgttttgcggatgaccggtacggattggcaccgcagcaaactcacggtcgctaacttcacgaatctgatcaaacgcggtttcccacgcccaggttttccacacgcagttaaccagtcgcccttccccatcaatcagttgcccggcagcatcccagcccagttcatccaatccacgcaagatacgcgtttcaaagcccgcctggtgcagcgcctgctccataaactgcgcgtgatagttttcctcgatatctttgtcctgcatgatatggacaaacggacgtgcacgactgtgtttccaggcaccagccaattcgttaatcagcccttccgccggattgaagccgttgcctttatagccctgctccgcccaacgttcgaggatcaagcccgcttcggtatgacaggaggcggagtcggcgttgtactcgtaaaccttcaggccacgctcatccatgcagaaatccatacgaccagtgatcatatggtgacggcgacgctgccaggagagacgcaaacgtggccagaggattttcgggatgtcgaacagcgccagcaggttgtcatctttcagcaccttgtcggttgcgtgaagatacatcaggtgcagctcgttggtggctttaattagctcctgctcggcactctcggtaatggtgtagtaatgataaggatcctgattgatcacctgaccgttggcctgcacataggcgttttgcagcggatctttttcatccagccatttaccgtcaaactggcctttgttttccaggcgcgctccgctgattttcagcagctcgcctgcaatttccggctgcggtaagctgtattcagtatcttccgtctggatcatccagcccagaatggtggtgtcatcaaaagtgtctttcagggtatagcagccgttttcgaccaccatctccagctcgcgcgtccactgttgcccttgcggcaacggggaatgaatcacgttctgttccgcaatacggactttgttgccatgcaattgggtaatgatggcgacatggccagtgtctttaaattcaccgcctttatcccagataagaagcgcacccgcgaccggcgcacgcgggctgccgttaggaaatgcctgcaatggcaggatgttgtcattaaccacttctcgcaggaagcgcaggctgaaaatctcccacgccatacccacgtcagtaaagaccacaccgtaattcagaaagagaaaacggcgagcaaattcaacgcattgccacttgtggcccatatattcgtcgtcgatatagctacggaatacggcgtcatcttcgtattcctgcggatcgagagaactgtaatcactagagtagattgctaccccacctggggcgtagcccaataatgtcccgaacggggcatcctggctggtcgttcctttgctcatcactttacctttaacaatacaacctaagcagttggcgtaattgttgtgctctgattacctgctcagcgacattaaccggacagaggtcagactaatcatacacctcatcgcagcggctggcgcaaagggttaaaaaattcacattctgtacagcaagtgacctgctacactgcttcaacactaccactcagaaggcaactcactatgacagacaatacttatcagcccgcgaaagtctggacgtgggataaatccgctggcggcgcgttcgccaatatcaatcgcccggtttctggtccgacgcatgaaaaaacgctgcccgttggcaaacacccattgcaactttatagcctgggaacgccgaacggtcagaaagtaacgattatgcttgaggagctgctggcgctgggcgttactggtgcagagtacgacgcctggctgattcgtattggcgatggcgatcaattctccagcggctttgtcgaagtgaacccaaacagcaagatcccggcgctgcgcgatcatacgcataatccgccgatccgcgtgtttgaatctggtagcatcctgctttatctggcggagaaatttggctacttcctgccgcaggatttggcaaagcgtactgaaacgatgaactggctgttctggttacagggcgcggcaccgttcctcggcggtggttttggtcacttttaccattacgcaccggtaaagattgagtacgccatcaaccgctttaccatggaagccaaacgtctgctcgacgtgctggataagcaactggcgcagcataagtttgttgcgggcgatgagtacaccattgcggatatggcgatttggccgtggtttggcaacgtggtgttaggtggtgtgtatgatgccgctgagtttcttgatgcgggcagttataagcatgtacaacgctgggcgaaagaagtaggcgaacgtccggcggtgaaacgtgggcgtattgttaaccgcaccaacggaccgctgaatgagcagttgcatgagcgccatgacgccagtgatttcgagacgaatacggaagataagcgtcaggggtaagggttggtgttcgtcgcagcaagccatccaggccggataaggcgttcacgccgcatccggcaatcgtgcacaatgcctgatgcgacgctgccgcgtcttatcaggcctacgaaagctaatcatcacgcgctggtaatgtcgtaatccatttggcgcagtgcgtctaatgtggctttggcttcatcttcgtcgatgatgctcatggcaaatccgacgtgtaccagcacccactggcccagtagatcggcagggttaccttcacaaatcagggcgatattcacatcgcgcttgataccacatacttcaacctgcgcaagctggtgaatatcttcaccgacagccagcacctggcctggaacgccaatacacattattaactccggttattcaacttcaatacttttgacgatcaggctatcgccggtatcgacacgcaaccgctcgccgtgacagagcggacactgcgcatcgtgctgatgaatctccaccacctggctgcaatcccagcaccaagcctgggcgggtttatagacgatatgtaaatcgcacccttgcgccaccgttccgtggcagacaatttcaaaactaaaacggacggcgctctcctcaacgcaggagagcgcgccaatttccagccacacggcggtgacgcgcttaacatcgtgctgctccgcctgccgttggataatttcaacggcgctctggcaaagagacaactcatgcattttcgccactcctgcgaccaaacagcagggcgcgacgccctgcgtgtggtacatccggattcgtgactggcaggctaaggatcattcgtgcgcagtcatccgtcaggcgttggccctcttcaatgctcatgctgtggctaagcgggctcatcaggctacaggagagatattggctaacaccgtccagttcgccaacggtaaaggtcatagtgccatacggcagttgcagaccaattttttcactcactttgcgcagcggccagagttgatccgggccggggaagataactgcactcagcatccacggggtgatcacacaccccgtccactgaccttcgaacagcgtaaaatcagaaacatacaccggcatactaggatgcagaaaagagagatcgtgcatgctacgccgggcaatttcttcaaacgctgcctgtacttgcgccttcggggaggtctggaaacctgctatctcttcagtcatgaatcgcctcccgtgggatggcttccacgccagattcacgcagcgcagccagaacctgctcaagcgcaggttcaatcattgcttcaaccgtcggcgttaagccgatgtgtggctccaggctttccgggatcacgccgaccagggtcagctttttcggaaactcgccggtgaagcgcagggcgctcaagacgtcggccaggccaagctgatgcggagagattttgttggtaaacaacgccggaacttcttcatcccgcaggatcatcatcgttcccggcgcgttctttttgctgacaatggcatccgcaataatcaaatgatcgcgatttgccatgtcgccaagcagctccattcccgccgtgccgccatcgaggatctcaacataatccggcagaatgtatcgttgctctaacgcttcgacaatccgcacaccgatggcttcatcggtcagcaaaatattgccgacccctaagactaaaatacgcattacagaaccttcacactaaccacttcgttgccgtcagcatccactacgtgtaccgcacaggccatgcacgggtcaaaggagtgaatggtacgcaccacttccagcggtttattcggatcggcaaccggtgtacccaccaggctctgctcgtaaggaccgacgtcatcattgaagttacgcggaccagagttccaggtacttggaacaaccgcctggtagttgctgatgataccgtctttaataaccatccagtgagagagcataccgcgcggcgcttcgaggaagccaacacctttgaattcacccgttgccggaatgttcggcttcacaaaggtggtgtgatcgcctttgccgatattggtgatcagtgcactgtattggttttgcaggatatcctgcaattcacagcagtgaacggtacgaccaataatacggcccagcgtggagtgcagctgtgccacttccagcgtgttgccagtcagtttctgataaatcgcaacgatttcattcagtttgttctgggtagattcgcgacctgccgccagtttcaccagcatattagccagtggccccacttctaccgttttgccgtagaaagtcggacttttcacccaggaatatttcccgtcgtcagaccaaccatcataagccggaatggtggtgccttcccacggtgcctgcggcgcttcgtctttataccaggagtgcttcgcgctttcctgaatgcctttgatcaggtattcatcggaatgagaagtgatcggacgatagctggacagatccgcattctcaatgtagccgcccgggaacaggaagctgccgtttttactgtcggtcgggaattccggcacgctcaggtagttcaccgcacctttaccgcgtgtcagccattccgggtagaacgcggcaataactgcggtatcaaccttataaacctgctcaacaaagtcgctcagtttgtcgatgaaagacttgatgtacatcaggcgctcaaggttcagcacgcccaaaccgtcgaggttgatcgggttcgcgacaccacctaccgccaggttctgaatgtgcggcgttttaccgcccagcagcgccacgacgcggttagcgtcacgctggcactccaacgcttgcaggtagtgcgctaccgcaatcaggttcacttccggcggcagtttcatcgccggatgaccccagtagccattagcgaaaatacccaactgaccgctggcaaccagatctttgatcttgttctgaactttggtgaactcttccggactgttcaggtgccaggtgctaacgcctttcagcatttcggaggctttggttgggtcagcttgcagtgcagaagtgatgtccacccagtccagcgcgctaagctgatagaaatgaacaatatggtcatgcgtggtgtgcgcagccagaatgatgttacggatgtattgcgcgttaaccggaacgtcgatattcagcgcactttctgccgcacgaacggaagacagcgcgtgagtggtagtacatacgccacagatacgttgcacaatcatccatgcatcgcgcggatcgcggtttttcacgatctcttccatgccgcgccacatggtaccggaagcccatgctttgctaacgacgccattttcgatttcgcaatcgatgcgtaaatgcccctcaatacgggttaccggatcaatagtaattctctggctcatgctttgctcgcctcatgacgattatgatcgttttgttttaaaggaggaagtatcggcagtagacgaatgagtacgatgtaagcgcaaatctcaatagccacaaaaccaatagaaatcaacagttcttcccaggtcgggaagtaggcgtaaccgccgcccgggttgaatgccaccaggctataggtcagacgccaggttgcacaacctaacagtgcgctcagtgcactcaggaacagcatgcgggaatcattacgcagcttcgccacacgcagaacgaccagcgggaagagcatcagcaggacttcaatccagaacatcacggagtagaagtcaccggcaaacgctaagctcagcttgtcgcgatagataagctcgccaaagcgcagcacgatgaaaatcgccagcaacacactgatggtgttggtcagcttaacaaacagactcttttcatccggaccgttgccacgcagacccgcctgcaccaggctaccttcaaagatgacaatgctgaagcccatgatgaacgccgtcagcaggctgaacagcggcaacatttcatagctctgccacaacggatgcaccttgtagcccgcgctgatcatcaggctccccatactagactggtgcatggtcggcagcagcgcaccgagcgcgatgatgaagaacatcaccttgtttagtcgctgtaggctcaccttccaccccagacgttcaaacagtgccggagcaaactccagtgccatcacgccgatatagatggtcatacagaccgccgtctcgaacagtacgctgttcacgttgaagtgacccggaatgtagaagtacggcaggttccagtagcgacccacgtcgatagtgatgctcaagccacccagactgtaaccaaacagactcgccaacagcgccggacgcaccagcggatggtattgcccacggttaaagacgtataccgcccacgccagcgcccagccgccacaggcaaagccggtgccaatcagcaggtcaaacgcgatccacacgccccacgggaagccgccgttcaggtcagagacagagcccagaccgaacaccagacgcttcacaatcaggagcatacagatgacgattaacggtccaaaaatcatgaccggtttactgatgattttgccgcccagcggttgtggatcatgactcatgatcgtctcctccgtcgtgattattcaactctcatgatcgtctcctccgtcgtgatggtcgtttttggtgttgcgacgaaccagcacggttaagcccgccagcacagccagtggtagcatcatgcctttatacagggtgtgttgaatattttcggaacgcgcaccggtagaaagatcgtccagtttcggcaggtcgagattttcataaggcacacccgtcagtaccagaacctgagtaccgccgccctctttctcgccgtacagatgcggataatatttcggcaccgtatgcaggtaagtgtcgccagatttcagcgtctgacgcggatagtggtattcgctgccaggcttcagcgccagacgttttttcgcctccgccatcagctcttcacgcgtaccgaaaatcaccgcgcccgccgggcacacttctacgcagccaggtagaccgcctttatcgagacgttccacacctttctggttgcacagctcgcacttatgcagcgcaccaaacgggttgttgtagtcgtacttcggcacgttgtacggacaggcgaccatgcagtaacggcagccggtgcacacatctttgtcgtaatggacaatgccggttttcggatcttttttcagtgcagagaccgggcacacagagacacagttcggatcgacgcagtgcatacactgtttcttaatgtacgcgtagccgttctcctcctggtctttgttgacccctgtgccgctggtccacacctgaatgatgttattggtatacgggctcagtttgtcgttgttgctccaggtctgttccccttgcgggttacgttcagggaaattgatatcctgacacttggtgacgcaagcctggcagcctacgcacaaggtgctgtcgtacaacatccccaggcttcccggaattggcgggcggttttcagcagccgcatgactgacagacggcagcgcgcccgtcagcaatgccccgcaggaggctgctttaataaaattacgtctgttcacggttattctccccgactgtcagcgttatctttcttttgctgacgacccagttcacgcaccgccatcacgctgacaccggcaaccaacccaaccacaccgccgagcaaaccaatagcgcctgcagagacgttgccgccctctttagcgttaacatccggtttctgactacgcggagtttgattttcgacgttggcaagctgatggatgcctttatggaagccgataccttcttcgttacagccatagcaagggtgaccaatcgccaccggccacacaccgccaacatcgcagaattgcagcgtactgcagttgccgtaagtttctggccctttacagccgaggtggtacaggcaccagccttcgcggtggccttcatcaccgaactctttggcaaaacgaccagcatcgaagtgcgggcgacgttcgcagtgttcgtgaatcagacggccataggcgaaggtcggacggtttttgtcatccagtttcggcggtttgccgtaagtgatgatgtgcgcaacggtcgcgaggaagttgtgcgggttcggcgggcagcccggaatattgataacggttttgcctggcagaacttcttgcaggctgactgcgccagttgggttaactccagctgcggcaacaccgccccacgcagagcaggaaccgatagcgataatggctgctgcgccttccgccgctttgcggatgtgatccacaatcggctcaccggcaaccatgcaataaataccgttatcttttaatgggatggaaccatccaccactaacacatactgccctttgtacttctcgagagcgttatgtttgttctcttcgacctgatgaccgaaggcggcggaaagcacttcgtgatactccagagagatagtctccagtacgaggttttctaccgttggatgcgttgcacgaagcagagattccgtacaaccggtgcactcctgcgcgccaatccagataactggcggacgctgcgggttagtaacgctttcggccatctctgcagcggctttgctacttaaccccatggtggcggctaatgctgcacaaagcttcatgaaatcacgacggttaatgccgtgagaatggatgagggtgttatctccagtcatttatagttattccgttgcgaagacctggcatatattttgcctcaatcgcaaaatcaataatgcgatcgatgcgccatttaccacacatttattatggttatcgatatcatgatactgcggcggggcgctaaaacgaagggaagaagcattagtgtaattaattaaagcaagataatacgtatgtttgatcaattttcgaggcgataaccggccataaaaaagcgcaacgtagaacaggaattattctcacgaaagaaatccattaccatctctttatccagtccatagcggcgcgtcagaatacccgcttcccaggcgctaagctggcgatctccggtcttttcgtacatccggtgactgtagcctaatacaaaaccgcgtttataatcggcacagaattttgtcacattaaccgcactgtcggcatgcgttgcttttaatcccgccattaagcctttaccaaaatggttattcatcgttcacctcattcgctatatattgtcatatatagcgatattttaggcaaagaacgacttttgcgcacgctattttttcatgcttgtttaagacgtaatcccgtaagagataaacctatcaggagagatatttatcgaaccatttcagtgtcctttgccaggcaagatcggcggcagatttgtcataacggggcgtggaatcattatggaatccgtgattaacccccggatagatatacgcctcataaaccttattattggctttcaacgccgcctcgtaagcaggccagccctcgttgattcgggtgtccagttccgcgaagtggagtagtaaaggcgcttcaatcttcgccacatcggcagtgggtgcctgacgaccataaaacggcaccgcgcaggccagttccggatacgcgacagccgccgcgttgcttacgccaccgccatagcaaaatccggtaatacccactttgcctgtcgcttgcggatagcgttgcataaactcaattgcggcaaagaaatcattcatcagtttgttggatcaacctgctgttgcagctcacgacctttatcatcatttcccggataacctccaacggaacttaagccgtcaggtgccagggcgatataccccgccttcgccactcgccgtgccacatcttcgatatacggattcagtccacgattctcatgcaccaccactacggctggcgttttgccgctcatctttgcgggcttcaccagataaccccgcacctcgccgtgaccatttgggctaggatacgtgatgtactcagcaacaatttccgggtcggtaaactctacctgagtcgccagcgcataatttggcttgagcaaatcaaacaacgctaatgccgtcatcccgcctaccgcacttcgccgcaaggttgaggaactcacgtttcgagattttcccgtgagcgtaatagtcatagtaatccagcaactcttgtgggaaatctttggcggttaaacgcggcatcgttgcactcctcagttggtgtttttttaagcaaagcataagcacgtatttttgcccagtttttcgtcactctgtgagccagactacgggatacgcgctggcgaatcgctaaactagaaacattgtttcgaaattgaacggtggaaaggagaggtcatggtctggttagcgaatcccgaacgttacgggcagatgcaataccgctattgcggaaaaagtggtttacgcctgcccgcgttaagcctcggtttatggcacaatttcggtcacgttaacgcgctggaaagtcagcgtgcgatcctgcgtaaagcgtttgatttgggcattacgcactttgatttagccaacaattacgggccgcctccaggaagcgcagaagagaactttggtcgcctgctgcgggaggattttgccgcttatcgcgatgaactgattatctctaccaaggctggctacgatatgtggcccggcccttacggctctggcggtagtcgtaaatacctgctcgccagcctcgaccaaagcctgaagcgtatggggcttgagtatgtcgatatcttttactctcatcgcgtcgatgaaaatacgccgatggaagaaaccgcctctgcgctggctcatgcggtacaaagcggtaaggcgctgtatgtcgggatctcctcttacagcccagagcggacgcaaaaaatggtcgagttgctgcgcgagtggaaaattccgctgttaattcatcaacctagctacaatttactgaaccgctgggtggataaaagcggcctgctggataccctgcaaaataacggcgtgggctgtattgcctttactcctctggctcagggattgctgaccggaaaatatctcaacggcattccgcaagatagtcggatgcatcgtgaagggaataaagttcgtggtctgacaccgaaaatgcttaccgaagccaacctcaacagcctgcgcttattgaatgaaatggcacagcagcgtggacaaagtatggcgcaaatggcgttaagctggttgctgaaagatgatcgcgtgacgagcgtattgattggtgccagccgcgcggagcaactagaggagaacgtgcaggcgctgaataatctgacatttagcaccaaggagctggcgcagattgatcagcatatcgccgatggcgagctgaatctgtggcaggcgtcttccgataaatgacctgttaataacgggcgcgcgaaccgcgcccgaatcagatcagtgattatgacgagtcagtcggtcaagatagcccatcacaaatgcagaaagcacaaacgtcagatggataatgacgtaccacatcagtttgttatccgggacatttttcgcatccataaagacgcgcagtaagtgaatggaagaaattgccacaatgctcgctgctactttgtttttcaggctcgttgcgtccattttccccagccagttcagcttctctttgttctcggagatatccagctgactgacgaaattctcataaccggaaaacatcaccatcaccagcaaaccgccaaccagcgtcatatccaccaggctcagcaacacgaggatcaaatcactttccgccatgctgaagatattcggcagtacgtgaataatctcctggaagaacttcagcgccagggcaactaacgccaggctaaggccaaagtacacgggggcaagcagccagcgagaagcatacattgcattttcaagaaaacgttccatacattcctgtcgtgtagttaaaacgggcaacagtatatcgcaattgagtaaacagcacgcaacagcaaatcaacatatacgttaaacctttgtcgcataattctgaggtttagggatcttcctggttcccttatcaacgcatcgagaacgtctacccttaaaggacgttgaacctgaagggagaaaaacgatgtctcatttaaaagacccgaccacgcagtattacactggtgaatatcccaaacagaaacaaccgacgccaggcatccaggcgaagatgacaccggtaccggattgcggcgagaaaacctatgttggtagcggtcgcctgaaagatcgtaaagcactggtgacagggggcgattccggaataggtcgcgctgccgccatcgcttacgcgcgtgaaggggctgacgtggcgatcagttatcttcccgtggaagaagaagacgctcaggatgtgaaaaagatcattgaagaatgcggacgcaaagccgttctgctgccaggcgatttaagcgatgagaaatttgcccgtagcctggttcacgaagcgcacaaggcgttaggcgggctggatattatggcgctggtcgccgggaaacaggttgccattccggatattgcagacctcaccagcgaacagtttcaaaagacctttgccattaacgttttcgcgctgttctggctaacccaggaagcgatccccctgctaccgaaaggtgcaagtatcatcaccactagcagtatccaggcataccagccaagtccgcatttactggactatgcggctacgaaggcggcgattctgaactacagccgtggcttggcaaaacaggtcgcggagaaaggtattcgggtgaatattgtcgcgccaggcccgatctggacagcactgcaaatttccggcggacaaacgcaggataagatcccgcagtttggtcagcaaacgccgatgaaacgtgcggggcaaccggcggaactggcccctgtatatgtttatctggcaagtcaggagagcagctacgtcaccgcagaagtgcacggcgtgtgcggcggcgagcatttaggttaaaaaaatgcccggttgtgaaaagcaaccgggcatcattgtgaattcactcttacctgatgtggcgaaaacgccttatccgcctacaaacgcatgaagattcaacatgttgcaatagattttgtaggcctgataagcgtagcgcatcaggcattgagcacctaatgccggatgcgtcgtgaacgccttatccggcctacaaacgcacgaagattcaacatgttgcaatagattttgtaggcctgatgagcgtagcgcatcaggcaattctactttacttcgctttggcggtttcttcgccgaccagacctatcttcaggtaacccgcctgatgcagcgtatccattaccttcatcaacgtctcgtaatcgacggttttgtccgctcggaagaagatggtggtgtctttcttgccttcggttaacgcattcaacgccgtaatcattgtttcatcggtgaccggatcgttaccgataaacatgctgttgtctgccttcacgctcagataaaccggtttttccgggcgcggctgcggcgtgctggtagaagcaggcaagttcaccttcacatctaccgtcgctaacggtgccgccaccataaagataatcagcagaaccaacatcacgtcgataaacggcgtcacgttgatatcatgcatttcgccgttatcgtcgaggttttcgttaagatgcattgccatcggatattatcctgcgcgtaatttttgtgcgacacgaaccggatgcgcagcggcgctggcttccagatccaggtcacggctttgcagcaacaatacctgcgctgcaacatcacccagcatcgctttaaagccgccaatctggcgtgcaaatacgttatagataacgaccgcaggaatcgctgccacgaggccgattgccgttgctaacagagcttctgcgatacccggcgcaacgactgccaggttagtggtctgcgtttgcgcgataccaataaagctgttcatgatgccccagaccgtaccaaacagaccaacgaacggagaaatcgcgccgatggttgccagatagccgttaccgcggcccatttgacgacccactgcggcgacccgacgctccagacggaagctggtacgttctttaataccttcgttatcgtcgctgccttcactcagttccagctcattctgcgcttcattgagcaaatgcaggcttaagcttttgctaccaaaatcagcggcgatatcgttggcctggtttaaggaacgcgcttcagccagcagttgctgctcgcgcttaaggcgacgcttctgattgaagaactctacgctcttactgaagaagattgcccaggtgactacggaggccaaaataagcccaatcatcacgcacttaacgacaatatcggcgtgctgatacataccccagacggaaaggtccgtctgcattaaattattacccactgtgtatctccaggacgcaagtcacaaaatctgcgcataataatatcaaaacgacgtcgaattgatagtcgttctcattactatttgcatactgccgtacctttgctttcttttccttgcgtttacgcagtaaaaaagtcaccagcacgccatttgcgaaaattttctgctttatgccaattcttcaggatgcgcccgcgaatattcatgctagtttagacatccagacgtataaaaacaggaatcccgacatggcggacaaaaagcttgatactcaactggtgaatgcaggacgcagcaaaaaatacactctcggcgcggtaaatagcgtgattcagcgcgcttctagcctggtctttgacagtgtagaagccaaaaaacacgcgacacgtaatcgcgccaatggagagttgttctatggacggcgcggaacgttaacccatttctccttacaacaagcgatgtgtgaactggaaggtggcgcaggctgcgtgctatttccctgcggggcggcagcggttgctaattccattcttgcttttatcgaacagggcgatcatgtgttgatgaccaacaccgcctatgaaccgagtcaggatttctgtagcaaaatcctcagcaaactgggcgtaacgacaagttggtttgatccgctgattggtgccgatatcgttaagcatctgcagccaaacactaaaatcgtgtttctggaaagcccaggctccatcaccatggaagtccacgacgttccggcgattgttgccgccgtacgcagtgtggtgccggatgccatcattatgatcgacaacacctgggcagccggtgtgctgtttaaggcgctggattttggcatcgatgtttctattcaagccgccaccaaatatctggttgggcatagtgatgcgatgattggcactgccgtgtgcaatgcccgttgctgggagcagctacgggaaaatgcctatctgatgggccagatggtcgatgccgataccgcctatataaccagccgtggcctgcgcacattaggtgtgcgtttgcgtcaacatcatgaaagcagtctgaaagtggctgaatggctggcagaacatccgcaagttgcgcgagttaaccaccctgctctgcctggcagtaaaggtcacgaattctggaaacgagactttacaggcagcagcgggctattttcctttgtgcttaagaaaaaactcaataatgaagagctggcgaactatctggataacttcagtttattcagcatggcctacagctggggcgggtatgaaagcttgatcctggcaaatcaaccagaacatatcgccgccattcgcccacaaggcgagatcgattttagcgggaccttgattcgcctgcatattggtctggaagatgtcgacgatctgattgccgatctggacgccggttttgcgcgaattgtataacattgccacttttggacaattttgcagacattttattgtgaaaagtcttaaattgttgcgtccgggatcaaggcgtcccggacgattcaggagtacaataggcagataaaggcttaaacgctgttccacaggaaagtccatggctgttattcaagatatcatcgctgcgctctggcaacacgactttgccgcgctggcggatcctcatattgttagcgttgtttactttgtcatgtttgccacgctgtttttagaaaacggcctgctgcccgccagttttttgccaggcgacagcttgttgatactggcaggcgcattgattgcccagggggttatggattttctgcctacgattgcgattctgaccgccgcagcaagtctgggctgctggctaagttatattcaggggcgctggttagggaataccaaaacggtgaaaggctggctggcacagcttcctgctaaatatcaccagcgcgccacctgcatgtttgaccgccacggtctgctggcgctgctggctggacgttttcttgcatttgtccgtacgctgctgccaaccatggcgggaatttccggtctgccaaaccgccgcttccagtttttcaactggttaagtggattgctgtgggtcagcgtggtaaccagttttggctatgccttaagtatgattccgttcgttaaacgccatgaagatcaggtaatgacgttcctgatgatcctgccaattgccttgttaaccgctggcttgttaggcacgctgtttgtggtgattaaaaaaaaatactgtaacgcctgacgattttccccgttcccggttgctgtaccgggaacgtatttaattcccctgcatcgcccgcattcttgccgcatcttcccccggcgtcacaccgaagtaacgtttaaactcacggctaaattggcttgcgctttcatagccgacgcgcatcgctgctgcgctggccttcatgccgtcatggatgatcatcatccgcgccttatgcagacggtaattcttcaaatactgcaacgggctggtactggtgacagacttaaaattatggtggaacgcgcttacgctcatgttggcttctgccgccagttgctcgacgctcaggttttcggtgtatttattctcaatccgtttcagcacgcggctaatcagactgaagtgagtctggcgactgaccagcgccagtaacgcgccgccgcaaggtccggtcagcacgtagtacagaatttcgcggatgatctgtttgccgagaatacgcgcatccagtggtcgctccatcacgtcgagtaaccgctccgccgcgcataaaatctcttcacttaacgtggcggagttaatcccgctggctgccatgctcggctggaaatgctcatcttcgccaatgtccatcaacagttcctgtaactgcaaaatatcgacattgagacgcaaccctgccagcggcacctcactcgtggcataggtttcgcactcaaacggcaacggcaccgtcagcagcaggtattcattggcatcataacgaaacacgcgttcattgatataaccgattttatgcccggaaaagagaattatgatgccaggctcgtacatcaccggtgtacgtgcgaaaggcgtctcgccatacaacaaacgcacatcgggcaacagtccactcaaactattttctttatttttcagtttattaactttatccgccagcaagcggcaaatctcttcacgtttcatatcgcgtaatttcttaggaataatgcggcaattactttgtgcgcaattttgtagcatttctccagcactctggagaaataggcaagacattggcagaaatgagcattgagagccagggcgctggcgatcacaatgaaaaacatcaggcagatcgttctctgccctcatattggcccagcaaagggagcaagtaatgaacaactttaatctgcacaccccaacccgcattctgtttggtaaaggcgcaatcgctggtttacgcgaacaaattcctcacgatgctcgcgtattgattacctacggcggcggcagcgtgaaaaaaaccggcgttctcgatcaagttctggatgccctgaaaggcatggacgtgctggaatttggcggtattgagccaaacccggcttatgaaacgctgatgaacgccgtgaaactggttcgcgaacagaaagtgactttcctgctggcggttggcggcggttctgtactggacggcaccaaatttatcgccgcagcggctaactatccggaaaatatcgatccgtggcacattctgcaaacgggcggtaaagagattaaaagcgccatcccgatgggctgtgtgctgacgctgccagcaaccggtagtgaatccaacgcaggcgcggtgatctcccgtaaaaccacaggcgacaagcaggcgttccattctgcccatgttcagccggtatttgccgtgctcgatccggtttatacctacaccctgccgccgcgtcaggtggctaacggcgtagtggacgcctttgtacacaccgtggaacagtatgttaccaaaccggttgatgccaaaattcaggaccgtttcgcagaaggcattttgctgacgctaatcgaagatggtccgaaagccctgaaagagccagaaaactacgatgtgcgcgccaacgtcatgtgggcggcgactcaggcgctgaacggtttgattggcgctggcgtaccgcaggactgggcaacgcatatgctgggccacgaactgactgcgatgcacggtctggatcacgcgcaaacactggctatcgtcctgcctgcactgtggaatgaaaaacgcgataccaagcgcgctaagctgctgcaatatgctgaacgcgtctggaacatcactgaaggttccgatgatgagcgtattgacgccgcgattgccgcaacccgcaatttctttgagcaattaggcgtgccgacccacctctccgactacggtctggacggcagctccatcccggctttgctgaaaaaactggaagagcacggcatgacccaactgggcgaaaatcatgacattacgttggatgtcagccgccgtatatacgaagccgcccgctaagctttttacgcctcaaactttcgttttcgggcatttcgtccagacttaagttcacaacacctcaccggagcctgctccggtgagttcatataaaggaggaacgtatggctaatccaaccgttattaagctacaggatggcaatgtcatgccccagctgggactgggcgtctggcaagcaagtaatgaggaagtaatcaccgccattcaaaaagcgttagaagtgggttatcgcagcattgataccgccgcggcctacaagaacgaagaaggtgtcggcaaagccctgaaaaatgccagtgtcaacagagaagaactgttcatcaccactaagctgtggaacgacgaccacaagcgcccccgcgaagccctgctcgacagcctgaaaaaactccagcttgattatatcgacctctacttaatgcactggcccgttcccgctatcgaccattatgtcgaagcatggaaaggcatgatcgaattgcaaaaagagggattaatcaaaagcatcggcgtgtgcaacttccagatccatcacctgcaacgcctgattgatgaaactggcgtgacgcctgtgataaaccagatcgaacttcatccgctgatgcaacaacgccagctacacgcctggaacgcgacacacaaaatccagaccgaatcctggagcccattagcgcaaggagggaaaggcgttttcgatcagaaagtcattcgcgatctggcagataaatacggcaaaaccccggcgcagattgttatccgctggcatctggatagcggcctggtggtgatcccgaaaagcgtcacacctagtcgtattgccgaaaactttgatgtctgggatttccgtctcgacaaagacgaactcggcgaaattgcaaaactcgatcagggcaagcgtctcggtcccgatcctgaccagttcggcggctaacatgcaaattctcccggtggcggtaatgttccgctaccggacttttcagaaatcatttattcccctcgcgtcccgcccgttgttactcttccttgttcaggaatgccaaatataaggacatcatcatgcagagccggaagctcttaaaagaacaactcatctatatccgggataaacgcaacggagaggtgaaaaacagatgaaaataatacttctgtttttagcagccctggcaagttttaccgtacacgcacagccccccagtcagaccgtagaacaaacagtccggcatatttatcagaactataaaagtgatgccactgccccttattttggtgaaaccggagagcgggcgataacttctgcgcgtattcaacaggcgcttaccctgaacgacaatcttacgctgccgggcaatattggctggctggattatgatccggtttgtgattgtcaggattttggcgatctggtgctagaaagcgttgcgataacccaaactgacgccgatcatgccgatgccgttgtgcgctttcgtatctttaaagatgataaagaaaagaccacgcagacactgaaaatggtggcggaaaatggtcgttgggtcattgacgatattgtcagcaatcatggcagcgtcttacaagcagttaatagcgagaatgaaaaaacgctggccgctttagctagcttgcaaaaagaacagccggaagcctttgttgccgaactctttgaacatattgctgattatagctggccgtggacgtgggtggtttccgactcttaccgccaggcggttaatgccttctataaaaccaccttcaagacggccaataatcccgatgaagatatgcaaatagaacggcaatttatttacgacaatccgatctgttttggcgaagagagcctatttagtcgcgttgatgaaattcgagtcctggagaaaaccgccgattccgcccgcattcatgttcgttttacgctgaccaatggcaacaacgaagagcaagaactggttttacagcggcgcgaaggcaagtgggaaatcgctgattttatccgcccgaacagcggcagcctacttaagcagattgaggcaaaaactgccgccagattaaagcaatgagctgaattaaataacaattagccggaacaataaataaaagggaacactatatgaaaacgattttcaccgtgggagctgttgttctggcaacctgcttgctcagtggctgcgtcaatgagcaaaaggtcaatcagctggcgagcaatgtgcaaacattaaatgccaaaatcgcccggcttgagcaggatatgaaagcactacgcccacaaatctatgctgccaaatccgaagctaacagagccaatacgcgtcttgatgctcaggactattttgattgcctgcgctgcttgcgtatgtacgcagaatgataaaaaaatccccggtagcgtgtcagttgccggggatattttttaacgtccaaccgccgctttaggccgtttcttcgcaccagcattcaccggacgagattgcgtagagctcgctttttttgccgtagcaggcgtctgacgctgggtcgccatcggcgtatgtttcgtcaacgccggacgggtattgcggttctggcgacgagcttcacgcatctcttcaatggttggcgcaggcactaagcaatcgcgacggctgccaatcagatgctttttgcccatcgcttccagcgcctggcggattaacggccagtttgccggatcgtggtaacgcaacaacgctttatgcaaacgacgctgtttgtcgcccttcggtacgaagacgtcttcgctcttataaccaatcttcgccagcgggtttttcccggtgtaatacatggtggtactgttcgccagcgggctcggatagaagttctgcacctggtcgaggcggaagcggtgctttttcagccacagcgccagattcaccatatcttcatcacgcgtaccggggtgcgcggagatgaaataggggatcagatactgctctttacctgcctgtttactgtaagtatcgaacagctctttaaagcggtcatagctgcccatgcccggcttcatcatcttgcttaacggcccttcttcggtatgttccggggcaatcttcagataaccgccgacgtgatgggtcgccagttctttgatatagcgcggatcttctacggctatgtcataacgcacaccagaggcaatcaggatctttttaatgcctttcagatcacgcgcacggcgatagaggttgatcgttggttcgtggttcgtgtccatgtgcggacaaatatccggataaacgcagctcaaacggcgacaagtttgttcagcgcgtgggcttttgcagcgcaacatatacatgttggcagttggcccaccaagatcggaaatcacgcccgtaaaacctggaacggtgtcgcggatcgcttcgatctcattaatgatgctatcttcggaacggctctgaataatgcgcccttcgtgctcggtgatagaacagaaagagcagccgccaaagcagccacgcataatgttgacgctaaaacggatcatttcgtaagccggaatacgggcattgccataggccggatgtggcacgcgcttgtatggcagcgcaaaaacgctgtccatctcttcggtagaaagcggaatagcaggcgggttgatccacacatagcggtcgccgtgtttttgcatcaatgcgcgggcacagcctgggttggtttcgtggtgcagaatacggctagcatgggcgtacagcactttatcgcccttcactttctcgaaagaaggcagcaacacgtaggttttttcccacggtttcgggcgcggtggctgcacggttacggctttggcttcctgctttttcggtgccaccggtttgttatccgcgcacggcaaatcttcaccatacggatgcgggattgggtcgatttttccaggggtatcaagacgggtggaatccacgccgctccagccaggcagcgcctctttcacgataatcgcggtattacgcacatcgcggatttcactaattggctcgcccatcgccagacgatgcgccacttccaccagcggacgctcaccgttaccaaacatcagcatgtcggctttgctatccaccagcacggaacggcgcacggtatcggaccagtaatcataatgcgcggtacggcgcagactagcctcaataccgccgaggatcaccggtacatctttccacgcctctttacaacgctgggtataaaccagtgtggcgcgatccgggcgcttacccgcgacgttatccggcgtgtaggcatcgtcatgacgtaaacggcgatcggcggtataacggttgatcatgctatccatgttgccagcagtaacaccgaaaaacagattcggtttacccagacgcataaagtcgtctttgctgctccagtccggctgggcgatgatcccgacgcgaaagccctgcgcttccagcatacgaccgcaaatcgccatcccgaagcttgggtgatcgacatacgcgtcgccagtaaccaaaatgatgtcgcagctatcccagccaagttgatccatctcttcacgagacatcggcaaaaacggtgccggtccaaaacaggcggcccagtactgcggccaggagaacaggtcgcgatccggttggatcagggagatagagctcattttgcttccagaaatgataaaaaaataatcaaaggccggggattataagccggaacgaaagagaaatcgaaaggtattccatactcgccctcctcgggcgagtatgaagattacggtaccggattgaccaacagttgcccaatgctgccacggtccgccatttccagcgtctgactgttgaagtagaacgggaagtgcgcccaggaaggctgaccgaaataaacaagcagctccacttgtccgtcaacccaaacggtatctttccagcctctgtcttccgggaacggcatcgcgccattcacgttacggatctggaacattacgccttcaatatggaacgcttgcggctcgtccgcgcgtaccgtccagcgttcccacgttccttgctgcgcggtgacatcaatacggttgacgtcccacagctgtccattaatacccgggtcatcacccagactgatatcgcgactgcgaattgggctaccagccatgatttcagttggcagcaagcgcatcggaagactgtctgtgaccagcggcagaaggccggttgggcgcagcgttagcaccagggtagaaaccagaatactggatggctcaaagaagccacgaatacgatcaacaatgctcgccgcttcgccacaggtgatgctcacttcatcgccgttgctcatatccaccagaatctcgcggcgctcgcccggtgccaggctaagttgcttcacgcttacaggagcaggcaggaatccctgatcgccagaaatcacatgtaacgggcgaccatcgttcatctgtagttgatagcgacgagagttgctcgcgttcagcagtcgcaagcgcacccagccacggctgacttcaacgtacgggctttgtacaccgttaaccagcagcgtatcaccaacaaagccgccgcttcccggttcgttgtattctggcgtaccaaagttatccagccgtttatcctggataatgaccggaaaatcatccacaccataatggttggggataggcaggctcttgctgacttcatcttccaccagccacattccggcaaggccgttatagacctgctgagccgtgcggttgggagtattggcgtgataccacagagtagctgcgttctggcgaatgggcagtacgggtgcccagtcagcgtttgggctcatcatccgtgccggaccgcccatcagcgggcctggtacctgtagcccggccaccgtcatactgacattttctgtcaggcggttgctgtaaataagcttaacatcgtcgcccttccagacgcggatagtcggccccaggtaacgaccattgattccccagacgctcgcgcgtgtccctggcgtaaaactccagtgcgcacgttgtacagtcataaacagcggttgcccacggcgagattcaagtagcggcggaacgggtagcggttgctgttgcccggctgcgctggccttcaggggaacagcgcctgcacaaagtgcaatcccgcttgcctgaatgaactgacgccgactgagactcatatttgctccatgtaaaactggctaaagtaataccgtgcaggaaagtgttccccgcaaaaatacagattgccgacttaaacttttccggcggcttcgcgttctgcgacttctttatcgagctcggcgattttttgttccattatgctacgacaatgggcagccagctcacgaacctgatctttgccatactgactgacgtcaattggcggcagcatttcgacaatcaccagaccgttgtgcagtcgattaagattaatcttattgctagttgtagagacgcacacgggaataatcgggacgcccgccgcaattgccgcgtgaaatgctccagtcttgaacggtagcaggccgcgaccacggctgcgggttccttccgggaacatccagatggaaatacggcgttttttgaagtgattcactacttccgcaatggtgccgtgagctttagtgcgattgtttctgtcgatcaataagttgccggttaaccagtacaactgcccgaagaaggggatccacagcaagctctttttacctaccgtcaccgtcggcggttgcacgatgttgcttgctgtcaccatgtcatagttgttctggtggttagcgatatagatagcattgccgtagctttcagcgtctgtaggtttacggcactcaactttcaggccaaacagcggcgcaagacggccaaacatatgcccaaaggtggccacatgtttcgggttacgcgggctgaaaaggcagtaaatggagccgaatacacagactaagatgctgtaaatcacggtaataataagacgaaagatatatagcataacaccctctgaaggtctgagagactggcattgtacgtcacctgaaatcaggttagggcattgttaaaagccgctctctggaaaagcgtattgttaatcgcaacgcatgaataaacaacggtttcaagggaatttttatcgtttccgggggttgaatacgctgccggatgacgacttaacgtttcatccggcgttccttgcaagcgggaggaaacagcgccctccccggcatattactcttcgctatcaccgctgctggcacggcgaggagagtcgatctcaacacgatcgatacgctgcaaaccgcgcatcaacgtaccgcggcgtccacgttcgccagtgactttctgtaactcttccgggcgcagtttaattttgcgtttcccaacatgaatggtcagcgtgctttgcggcggcagaacgtacaattgcgccagaccatcttctccacgcgcggcttctgcgcttggaatgttgataatcttgttgcctttgcccttgctcagctgcggcagatcacttaccgggaacatcaacatacggcctgcctgagtgattgccagcagcatatcggaagcatcttcaatcaccaccggcggcataacatgggcattttccggtaaggtgatcaaagccttacctgcacggttacgcgccaccagatcgttaaaggtgcagacgaaaccgtaacccgcatcggaagccatcagcagtttctgatcgtcgctttccatcagcatatggtcaacggtcgccccaggcggcaacgttaatttgccggtgagcggctcgccctgaccacgcgcgctcggcagcgtaatcgggtcaatggcatagctacgaccggtggaatcaacaaacactaccggttggttgctcttacctttcaccgccgctttgaagctatcacccgctttataattcaggcccggcgcgtcgatatcatggcctttagcgctgcgtacccagcccatctggctcagcacaatggtgacaggttcagacggcagcatgtcgtgctcgctcatcgctttcgcttcttcgcgttcctgcaacgggctacgacgatcgtcaccgtaggcttgcgcgtctgcctgcagttctttcttcagcaggttattcattttacgctcggaagccaaaatgccctgcaactggtcgcgctctttttccagttcactctgctcaccgcgaatcttcatctcttccagtttggcaagatgacgcagtttcagttcgaggatcgcttccgcctgggtttccgtaaggccaaaccggctcatcagcgccggtttcggttcatcttcattacgaatgatctcaatcacttcgtcgatattgagaaacgccaccagcaaaccttcgaggatatgcaggcgcttgaggactttctccagacgatagttcagtcggcggcgcacggtatcgcggcggaacaccagccattcggagaggatttccagcaggtttttcaccgccggacgaccatccagaccgatcatattaaggttaatacgatagctcttttccagatcggtggtagcgaagaggtggttcatcacctgatccatatccacgcggttggaacgcggcacaatcaccaggcgggtcgggttctcgtggtcagattcatcgcgcagatcgtcaaccatcggcagctttttgttgcgcatttgcgcagcaatttgctccagtacgcgcgcaccactaacctgatgcggcaatgcgctgataaccaccgcgccatcttctttcttccacaccgcgcgcatacgcacactaccacgtccgttctcgtagattttacggatctcggcgcggctagtgataatttccgcttcagtcggataatccggcccctgcacgatatccagcagctgatcgagcgtggttttcggctggtcgattaatgcgattgccgcctgagccacttcacgcaggttatgcggtggaatatcggtcgccatgccgacggcaataccggtggtgccgttaagcaaaatgtttggcagacgggcaggtagcattttcggctcctgcaaagtgccgtcgaagtttggcacccagtcagccgtcccctgccccagctcgctcaatagcagctcggaatatttgctcaaccgggattcggtgtaacgcattgccgcgaagcttttcggatcgtccggcgcgccccagttcccctgaccatcaaccagcggataacggtaagagaacggttgcgccatcaggaccatcgcttcataacaggcgctatcgccgtgcggatggtatttacccagtacgtcaccgacggtacgggcgctttttttaaatttggcgctggcattcaggcccagttcagacatcgcatacacaatgcggcgctgaacaggtttcagaccatcaccaataaacggcaacgcacggtccatgatcacgtacatggagtagtttaagtaggcgttttccgtaaattcatgtagcgcaaggcgctctgccatatcgctcattaattctgattcctcaacttattcgccagccttcaaaggggcaatattgccggagatactacattatctgccgcgtcgagtcacaggagatcaacgtgaatagcgccgccggacgtgctccgacggcgataaaggcatcaatgtgccttgatatacaactctttgctgtagacataatcctggggattatgcagcggaaaaccgccaacgtagggtttaagcagtttgattaacggctgatagtagataggaatcagcggtgcctgttggttgatgatcacttctgcctgctgatacaacgcattacgctttgtcgcatcagtgatctgcgtggcctggtttagtaaggcgtcatactgcgcatttttccagtgaccgacgttttcttcactatcgcttttgagcgtgttcaggaagctggaagcatcattgtacgtcgcatcccagctctgccgagacagcatgaaatcaccggctcgtcgggcatcaagataggttttccactccattgtgcgcagcgtcacctgtgcacccagccattttttccattcggaagacaacgctatcgcggtcttttcatgcagatcgtacttgttgtagaacagctcaaagcgtagcggatgagaggcgtcgtatcccgcctgtttcagcaaggcttttgccatcgcgacgcgctcactcattggcttttgcagttcatcgaacgtcgtcgcgctaaagccttttacctctggcggcgtcagcgtggttgcgggcgttctcaaccccagtaccttttgcgcaataagctgtcgatcaaccgtaagatatagcgcccgacgcactcgcacatcgttaaatggcggtttctcaaggttgaagttgtaatattcgctgttcagacgcggaataattcgtagctcgccaggcagacttttttcaatggcgggaatttgctgcgccggaacccaggtgagatcgacctctcccgcgcgatagcggttatagccggtgacgctattatctagcgccagatactcaacctgttgcaatactgtatgttgcgcatcgcggtactttggatttttgcgtgcagtaatcttttcgttaactacccactgatcaagcacaaaggcaccgttgtaaaccatgttctctggcttactccagctatcgccatgtttagcgatgacatgatgaggaaccgggaacagcgtcggccaggcgagcatcgtcgtgaaccaaggaaccggctgctcaagcgtaacttcaagagtacgatcatccgtcgctttgacacccaggcttgtaacatctgctttacccgcaacaatagctgcggcattgttaatgtgcgcctgtgccagatagccagcaaaagggcttgccgttttcgggtcaaccgcgcgctgccagccgaggacaaaatcctctgccgtcagaggctgaccgtcggaccactgcaaaccgctacgcagatggaaaatatagcgcttgccgccgtccagtatctcccagcgttcagcctgagcgggctgcacctggccttcaccgtccatccataccagaccttcaaacagatccagcacaatctgcgcggcagtattctcctccaccttttgcgggtcgagcgtacctgggtcgctatgattgttgtaacgaaagacttgttgcggggcgagcggtgtgttggcgggaacgtcagcagcgtagagaggagccgcacttaccaggctgaccagccataataaatttcgcgtatacatggtattccttaccggagaaattataagcccaacaacaatacgcctgtggcattgttcgctcaaacttatcgcgagtgatttggctcacactccggtaaagaaaaaagcgagttgcccccgcttttccattaattaacggatttcattcaatagttctggatgcttatccagaacacgtaaaagtttgattgtggaaggatgaggttgggcattgcctttttcgtaacggctaaacgcatttacacctcccccaaaaatttcgcttgcctctttttgggtaagagagagcttttttcgaaccttcactataaattcaggtgccactgtttcggcattcacgctagcccgaaatgcctttacttgcgccatgaaagcatcactctcttctttattcatgatgctctcttcgcaatggacacaatataaaccgtggatacctttcaatactgtttttcgtccacggaaggtgtatggaatatctttaatgccagaaaccatttctccctggtggcaaaccggacatttcatattacttctccttaaagctgacgatcagtacgtcatgaattaccgtaattttaagataaacctggcctgtaacaagcctgggtctgtaaacatcctgccagatagtatgatcagagtaggtggtcatgcttttataaaagtcgctctcacttaatccaatgataacattacacataccatcaaaatccaaacctaactcatctgcatttaacagggcactacgtgttgtacgaacttgcccggcattgacaagttttttaacctgactcaaacgtgtatgtggtgtgcgtttttccataacccccgcctccctgttactttagttataacctaaaaggttaattacagcaatgaaaaagcacctaaaaggttagttagatgtacggagatagtgaccacacaaaacgtattctttaaggaaagtgattgaccatataagaaagtggcgcattagtagcgccagtttgaagcaggaatttataagggaagctggagtcaggcatcacgccaacggcacataaacatccgtttccagtcgctgctctgtcaccccttcggcaagattggtgtagtgaaacagaatcggtgctttacgcattttctcgccgcttgcaggcagccagtggcgaatgatgccccataccgtgtgactaatatcgtccagctcgccaacgtggcgggccacggcataacgtccaccggtaagttcaccattgctcacaccataacgattatcgggaatcggttcgctaacgctgccgcagatatcaaagcgaaacgcttccggtgcggtggtggcagggtcgtcccaggcgacgccaaaagtctggctttggttaacaggagaaagccccgtctctttacgccacatgataaatttcgccacgctgtagttgagcaattcagggctacagcggtgcggcaacatcgccacaggtatacttgggaaatcgataatgtttacatccagtgtcaggtttgtcattttgcctccctgcgaaattattcccgggaacgcgtcccgggagcggtaacaattacggatttactttgcggatctgtttgacgtcaatttcaacagaattccagtctttatcgacttcaccctgaatctcaaccgtatctttcggcgtcaccgtcacgccgttccagcgtttgtggtcgatatcaacattgatagtaccgctggcatctttgaacacgtagagatcgtcagagatgcgttcaacgatattgccgcgcagggttacccaggtgtcgtcacgcagggattttgcgctttctacagtcgttacgctgccgttcggcccctggaatcctccggcctgactttgcgttgcgcttgggccagaaaaaccgccctgctctgctgccatcaccggtgcgctgcacagggccattactgcgattactgctgcgaattttttcatgtttattactccctttaatgtctgtttccgagcatttaacaagatagtccttaacaacttcttaagggaaaaaaataaaatttagtgctgtacagagcgcgttacaacacggtttactggcagcaaatacggttatcgcagggatgaaaaaatgcgaattttactgatagaagatgacatgctgattggcgacggcatcaaaacgggccttagtaaaatgggttttagcgtcgactggtttacacaaggtcgtcagggaaaagaggcgctttatagcgcaccttatgatgcggtgatcctggatttaaccttaccaggcatggatggtcgcgatattttgcgcgaatggcgagaaaaaggtcagcgtgagccggtactgatcctgaccgcgcgcgatgcgctggcggaacgtgtagaagggctgcgtctgggagctgacgattatctgtgtaaaccttttgcgttgatagaagtcgccgccaggctggaagctctgatgcgccgaaccaacggccaggccagcaacgagctgcgccacggtaacgtcatgctcgaccccggcaaacgtatcgccacgctggctggcgaacccttaacactgaaaccaaaagaatttgccctgctggaattactgatgcgtaacgctggtcgggtactgagccgcaaactgattgaagagaaactgtatacctgggacgaagaggtcaccagtaatgccgttgaagtgcatgtgcatcatctgcgacgcaaactcggtagtgattttattcgtaccgtgcatggtattggttacacattaggtgagaaatgaaatttacccaacgtcttagtctgcgcgtcaggctgacgctaatctttttaattctggccagcgtgacctggctgctttccagctttgtcgcctggaaacaaacaacggataacgtcgatgaattgttcgacacccaactgatgctgtttgccaagcggttaagtacgctcgatctcaacgaaatcaacgcggcggatcgcatggcacagacgccaaatagattaaaacacggtcatgttgatgacgatgcgctgacctttgccatctttacccacgacggcagaatggtccttaatgatggcgataacggagaagatattccctatagctatcaacgggaaggttttgctgacgggcaactggtcggtgaagacgatccttggcgttttgtctggatgaccagtcctgatggcaaatatcgcatcgttgttggccaggaatgggaataccgtgaagacatggcgctggcgattgttgccgggcaattgatcccgtggctggtcgcactgccgattatgttaatcatcatgatggtactactgggtcgtgaactcgcgccgctgaacaaactggcgctggcactacgtatgcgtgaccctgacagcgaaaaaccactaaacgcgactggcgtacccagcgaagtgcggccactggttgagagcctaaatcaactgttcgcccgcacacatgcgatgatggttcgtgaacgacgctttacctccgacgcagctcacgaacttcgtagcccgttaacggcgctgaaagtgcaaaccgaagttgcgcagctctctgacgatgatccgcaggcgcggaaaaaagcactgctccaattacattccgggatcgatcgcgctactcgtctggttgatcaactgctcacgctaagccggctggacagtctggataaccttcaggacgtcgcggagatcccgcttgaagatctcctgcaaagcagcgtgatggatatttaccacacggcgcagcaggcgaaaattgacgtgcgactgacactcaatgcccacagcatcaaacgcaccgggcaaccgctattgctaagtttgttggtgcgaaatttgctggataacgccgtgcgctacagtccacagggcagcgtggtagacgtcacgctgaatgctgataatttcatcgtgagggataacggccccggtgtgacaccagaggcactggcgcgaattggcgaacgcttctatcgcccacccggacaaaccgctaccggcagcgggcttgggctaagcattgtccagcgaatcgccaaattgcatggcatgaatgttgaatttgggaatgcggaacaaggtggatttgaggcgaaggtaagctggtaacttctctgtctatgagagccgttaaaacgactctcatagattttattaatagcaaaatataaaccgtccccaaaaaagccaccaaccacaaaccagacaaataccgaggctgaatacatatacccaaaactcgaacatttcccgcataaagagttttcttaagataagaataataagtggcgtaagaagaaaaaatgctgcaatcattgcttgcaatatacgatcttcgccactaacggaaggtatactgcaaatatttcctccgctctcaagcatccagtcatacttattgaaagcaaaaaaagaatctattaaccaataagtaagcattatatatagcaatgcttcaaatattgttttaattttctgctttaacatatatcagtacgctcataaaaatccatttataattatcaacatgacacgttgatactttcatcttttacttattcaaagccatattttcaatccccaaaaaaaccgaaccaaacgtgtaaattattccggtgcgagtaagaattatgaggaatggctatcagtattgtcattttcagaaaatatttatcctgcatcggtgagtcagagtaagatcagacttttgctaaattcgcaaaagactttgcacattttgctaatttcaccgtaccgctctgtgacgtactatagtcggcaaacgtctcaccttgaggttaaaaaatgagcaacatcctgattatcaacggcgcgaaaaaattcgcccactccaatggtcaactgaacgacaccctgaccgaagtcgcggatggcacactgcgcgaccttgggcatgatgtccgcatcgttcgcgccgacagcgactacgatgtcaaagcggaagtacaaaactttctctgggctgatgtggtgatctggcagatgccaggctggtggatgggcgcgccgtggacagtgaaaaaatacattgatgatgtattcaccgaaggtcacgggacgctgtatgccagcgatggtcgtacccgcaaagatccgagcaaaaaatacggttccggcggcctggtacagggcaaaaaatatatgctttctctgacctggaacgcaccaatggaagccttcaccgaaaaagatcagttcttccacggcgttggcgttgacggtgtgtatctgccgttccataaagcaaaccaattcctcggtatggaaccgctgccgacatttatcgctaatgacgtgataaaaatgcctgatgttccccgctatactgaagaatatcgcaagcatcttgtggaaatttttggttaactagagctcaggctttagaaggagttaaccatgcttaccgtaatcgcagaaatccgtactcgtcctggtcaacatcaccgtcaggcggtattggatcagtttgctaaaatcgttccaaccgtactgaaagaagaaggttgccacggctatgcgccaatggtggattgcgcagctggcgtgagtttccagtctatggcaccggattctatcgtgatgattgagcagtgggaaagcatcgcgcatcttgaagcgcatctgcaaaccccgcacatgaaggcgtatagcgaagccgtaaaaggtgacgtgctggagatgaatatccgtattctgcagccagggatttaatcctgccttgtttgcccggccatcctgaccgggcaatgttctttcctttaaacctcaatctccgccatgtcgcctttctcttgcaaccagttgcggcgatcttcgctgcgtttcttcgccagcagcatatccatcatcgcgtcagtacgctgatcgtcttcatcatcgatagtcaactgcaccagacggcgagtgttcggatcaagcgtggtttcgcgcaattgcatcgggttcatttcccccagacctttaaaacgctggacgttcggcttgcctttcttgcgttttaattgctcaagtacgccctctttctcttcttccgtcagcgcgtaataaacctctttcccgagatcaatacggtagagcggtggcagtgcgacgtaaacgtgaccgtgtttcaccaacgcgcggaaatgttttacgaacaaagcgcagagcagcgtggcaatgtgcagaccatcagagtccgcatccgcgaggatacagattttgccataacgaagctggctcagatcgtcgctgtcaggatcgataccgatcgctacgctaatatcgtgcacttcctggctagccagcacttcgtcggaagagacttcccaggtgttaaggatcttacctttcagtggcatgatcgcctgatattcgcgatcgcgcgcctgcttggcagatccgcctgcggagtcaccttccacaaggaacagctcggtacggttaaggtcctgcgcggtacaatcagccagtttgccaggcaacgccgggccgctggtcagctttttacgcaccacttttttggccgcacgcatacggcgctgggcgctggaaatcgccatctccgccagcagttcagccgcctgaacgttctggttcagccacaggataaaggcatctttcaccacgccagaaacgaatgccgcgcattgacggctagagagacgctctttcgtctgcccggcaaactgcggatcctgcatttttacactcagcacataggcgcagcgatcccagatatcttccgcgctcagctttacaccgcgcggcagaatattgcggtattcacagaactcacgcatcgcgtccaacaggccctgacgcagaccattaacatgggtaccgccctgcatcgttgggataaggttgacgtagctttcggtcagcagttcaccgccttccggcagccacagtagcgcccagtccacagcttcagtatcaccagcgaaattaccgataaacggtttttccggcagcgtcggcagaccatttaccgcttccgccaggtaatcattcagaccgtcctgatagcaccagcgttgttcggtattgttgatctcatctttaaaagtgatctcaacgccagggcacaataccgctttggctttcagcacatgcgtcaggcgactaacagaaaatcgcgggctgtcaaagaaggtttcatccggccagaagtgcacactggtaccagtattgcgtttaccgcaagtgccgacaacctgtaaatcctgcaccttttcgccattttcaaaggcgatgttataaacctgaccatcgcggcgcacgttaacttctacgcgcttgctcagggcgttaaccacgctaatccccacgccatgcaggccgccagagaactggtaatttttgttagagaatttaccgcctgcatgcagacggcaaagaatcagttcaaccgccggtacaccctcttccgggtgaatatccaccggcatcccgcgcccatcgtcaataacttctaagctctggtcagcatgtaaaataacgtccacgcgttttgcgtgacccgccagtgcttcatccacactgttatcaatgacttcttgccccaaatggttagggcgagtggtatcggtatacatccccggacggcggcgaaccggctcaagcccggtgagtacctcaatggcatcagcgttataagtttgcgtcatggtttaagttagtaattcgagttgatcgtcagagatggtgcagaccaagaaaatcgacgatcgggttgaaataatcttcgaagcccgtgaatgcgtggttgccgccttctatgacagtctggcggcaggaagcgtagtacgccaccgcctggcggtaatccagcacttcatctcccgtctgttgcagcagccagatcaaatccggcgcttccagcgggtcaatctgcatgactttaagatcgtaaatatggcgactctctagcacatattgctgcccggtgtaggggttctcgttctgaccgagatagtccgtcagcagttcaaacgggcgcaccgccgggtttaccaccactgcgggcagcataaaacattgactcaaccaggtggcgtaatatccccccagactgctaccgacaatacccaggctatcaccgccatgttccaggacaatggattccagcagctctgccgcgtcggaaggatacggcggcaactgcggaatgatcatctcaacgtcagggtgatgttccgccagccagttttttaacaagctcgcttttgcagagcgcgggctgctgttgaaaccgtgtaaataaagaagcgtagacatcagtagccttcactagcggtatcaggttggaaacgtgtgtccgccaggcgatgcacctcggtggtcagcgtgccatcagcatgtaactcgagagtacgccagccgggcgcgatggtatccagcgtaaagttggaacagtgcggcttaaactgcacacaggtgctcggcgttgccagcaggcggcgaccattccagtcgagatccagctcctgatgaatatgaccgcacagcaagtatttgacgtgcggaaacttcgccagcacggtatccagttcgcccgcgttacgcagactgtgttgatcgagccaactacaacccgcaggtagcggatgatgatgcagcagcagcaacgtatggcgttctggcgcatcggccagtttacgttccagccactcaagctgaaactcgctcagctcaccgtgcggcacgccaaacacctggctatccagcaacaggatttgccattgctcaccaataaacacgcgcttcgccggggagatacccgcatcctgtaacgcgctgtacatcgcgggctggaaatcgtggttgcccggcagccagacgcagggcgcacgaaaacttgcgatgccttcagcgaaatgctgataggccgcagaggattgatcctgcgctaaatcacctgtcgcgacaatcaggtcgaattcgtgctggtgtggccgaatcgcctccagcaccgcctggtaactctcccaggtgtttacccctaacagggcttcgtgcttttgtgcaaacaggtgagtgtcggtaatttgtaaaatcctgactctggcctcaccagccagaggaagggttaacaggctttccaaatggtgtccttaggtttcacgacgttaataaaccggaatcgccatcgctccatgtgctaaacagtatcgcaaccagtccgctaaaaactgattaatttgatgcttttcgtcgcgttgatgcaactttttattaggataatcataccgcgctttgaagcgaaaaatctgctggctactacacacttcagccaccatcgcgtcatgatacagacgcaccgtcatactcggaaggctccagtaactgatcgcgggcgcagtctgttctattgtcaccagggtagtgtatcgggtgctttccacaatcgtcagccgatattgtgcgtttgccacctgatagcttacagtttcgccgggtgcgtcattgcgcggtaacaaacggcgcaattgactaaagttcatctcgcacaggcgcatcatttcaggaaagtcaggtgtgtaacgcttcatttatgcccactcattttttaacgcttgatgatgcagctgcagccattgcaaagcgatgacgctcgctgcgttgtcgattttcccctcttctacccactggtatgcctgttcccggcttaccacatgaacgcgaatatcttcgttttcatcagccagaccgtgaataccgcttgcggtcgtggcgtccacttcgcccaccataatactgctacgctcactggtgccccccgggcttgccaggaaacttaacaccggtttggtccgtttgactatcagtcccgcctcttcaatcgcttcgcgacgggcaacatcttccacactttcaccctcttcaatcatcccggcaaccatctccagtagccaaggggtttcgctggtgtcgtacgcggcaatccgaatctgctcaatcagcacaacttcatcacgcactgggtcaaagggtagcaagactgcggcgtgaccgcgctcaaaaatttcccgccgcacctcatgactcatttgcccgttgaatagacgatgacgaaatctataaagatctaaactaaaaaagccgcgataaagtgtttctcgtgcaataatttctacatcgtttttgccaaatgtaacgggcaggttgtctggcttaagcattgttaatgtcctggcactaatagtgaattaaatgtgaatttcagcgacgtttgactgccgtttgagcagtcatgtgttaaattgaggcacattaacgccctatggcacgtaacgccaaccttttgcggtagcggcttctgctagaatccgcaataattttacagtttgatcgcgctaaatactgcttcaccacaaggaatgcaaatgaagaaattgctccccattcttatcggcctgagcctttctgggttcagtagcttgagccaggccgagaacctgatgcaagtttatcagcaagcacgccttagtaacccggaattgcgtaagtctgccgccgatcgtgatgctgcctttgaaaaaattaatgaagcgcgcagtccattactgccacagctaggtttaggtgcagattacacctatagcaacggctaccgcgacgcgaacggcatcaactctaacgcgaccagtgcgtccttgcagttaactcaatccatttttgatatgagcaaatggcgtgcgttaacgctgcaggaaaaagcagcagggattcaggacgtcacgtatcagaccgatcagcaaaccttgatcctcaacaccgcgaccgcttatttcaacgtgttgaatgctattgacgttctttcctatacacaggcacaaaaagaagcgatctaccgtcaattagatcaaaccacccaacgttttaacgtgggcctggtagcgatcaccgacgtgcagaacgcccgcgcacagtacgataccgtgctggcgaacgaagtgaccgcacgtaataaccttgataacgcggtagagcagctgcgccagatcaccggtaactactatccggaactggctgcgctgaatgtcgaaaactttaaaaccgacaaaccacagccggttaacgcgctgctgaaagaagccgaaaaacgcaacctgagcctgttacaggcacgcttgagccaggacctggcgcgcgagcaaattcgccaggcgcaggatggtcacttaccgactctggatttaacggcttctaccgggatttctgacacctcttatagcggtagcaaaacccgtggtgccgctggtacccagtatgacgatagcaatatgggccagaacaaagttggcctgagcttcagcctgccgatttatcagggcggaatggttaacagccaggtgaaacaggcacagtacaactttgtcggtgccagcgagcaactggaaagtgcccatcgtagcgtcgtgcagaccgtgcgttcctccttcaacaacattaatgcatctatcagtagcattaacgcctacaaacaagccgtagtttccgctcaaagcagtttagacgcgatggaagcgggctacagcgtcggtacgcgtaccattgttgatgtgttggatgcgaccaccacgttgtacaacgccaagcaagagctggcgaatgcgcgttataactacctgattaatcagctgaatattaagagtgctctgggtacgttgaacgagcaggatctgctggcactgaacaatgcgctgagcaaaccggtttccactaatccggaaaacgttgcaccgcaaacgccggaacagaatgctattgctgatggttatgcgcctgatagcccggcaccagtcgttcagcaaacatccgcacgcactaccaccagtaacggtcataaccctttccgtaactgatgacgacgacggggcttcggccccgtctgaacgtaaggcaacgtaaagatacgggttatctgccgcattcttcccccttcagccttcaatttcgaccagccatcctctattctgatgggtatttaccactggtcccggaagacaaaaatgaaacggacaaaatccatacgccacgcatcgttccgcaaaaactggagcgcacgccatctgacaccagtcgctctcgcggttgccactgtttttatgctggctggctgtgaaaagagtgatgaaacagtgtctctctatcaaaatgctgacgactgtagtgctgcaaacccaggcaaaagcgccgaatgtaccaccgcgtacaacaatgcgctgaaagaagccgaacgtactgcgccgaaatacgccacccgtgaagactgtgttgctgaatttggtgaaggtcagtgccagcaggcaccagcccaggctggcatggcaccagaaaaccaggcgcaggcccagcaatccagcgggagtttctggatgccgctgatggccggttacatgatggggcgtctgatgggcggcggcgcgggatttgcacagcagccgctgttctccagcaaaaacccagccagtccggcttacggtaaatataccgacgcgacgggtaaaaactatggcgcagcccagccaggccgcaccatgaccgtaccgaagacggcaatggcaccaaaaccggcgaccaccactaccgttacccgtggcggttttggtgaatctgttgccaaacaaagcactatgcagcgtagtgcaaccggtacctcttctcgtagtatgggtggctgataccgatggaaagagtcagtattaccgagcgcccggactggcgtgagaaagcccacgaatacggtttcaattttcacaccatgtacggcgagccgtactggtgtgaagatgcttactacaagttgaccctcgcccaggttgaaaagctggaagaagtcaccgccgaactgcaccagatgtgcctgaaagtggtggaaaaagtgatcgccagcgatgagctgatgaccaaattccgcattccaaaacacacctggagttttgtgcgccagagttggctgacgcaccagccaagcctttatagccgtcttgatctggcgtgggatggcactggtgaacctaaacttctggaaaataacgccgatacgccaacgagtctatacgaggcggcgttctttcagtggatctggctggaagatcagcttaacgccggtaacttgccggagggcagcgaccagtttaacagtctgcaagaaaaactgatcgatcgcttcgttgagctgcgtgaacagtatggcttccagttgctgcatctcacctgctgtcgcgacacggtggaagatcgcggaaccattcagtatttgcaggactgcgcaacggaagctgaaattgctactgagttcctctacatcgatgatatcgggttaggtgaaaaaggtcagttcacggatttacaggatcaggtaatttccaacctgttcaaactgtatccgtgggaatttatgttgcgtgagatgttcagtaccaagctggaggatgcaggcgtacgctggctggaaccggcgtggaagagcattatctccaacaaggcacttctaccgctactgtgggagatgttcccgaatcacccgaacctgctgcccgcttattttgcggaagatgatcatccgcaaatggaaaaatatgtggttaaaccgatcttctcccgtgaaggcgcaaacgtgagcatcattgagaacggcaaaaccattgaagcagcggaaggtccgtatggcgaagaagggatgattgttcagcaattccacccgttaccgaaattcggcgacagctatatgctgattggtagctggctggtgaacgatcaacccgccggaattggcattcgtgaagaccgtgcattgatcacccaggatatgtctcggttttatccacatatttttgttgaataagccacgataccggatggcactcgccatccggtaattgttagcctatctgcacgctcagcatactcaggctgcccatttctataccctcaaccggaatggtaattggctcctgcccatcccacgcacctaacacatacaacaacggcaaataatgctctggcgttgggttgcttaacgtgccaccttcatggtcgaggtaattcaccagaggatgttgttccactggcccttgccacgtcagattcgctttcacatactcattaaagctcgtcgcccacggatacggactactatcaccgtgccacttcactgtgcgcaggttatgcaccacgttaccgctggcgaccaacattattccttcatctcgcagcgctgccagtttgcgccccatttcgaaatgccaggcggcaggtttgctactgtcgatactcaactgcaccatcgggatatcagcgtcaggatacatcttaatcagcacgccccagctgccgtggtcaaagccccaggcttctttatccagcgtcaccgggatcggcgctaacagctcaaccagacgctgtgccagcgcagggctacccggagcaggataatgcgtatcgtacagcgcctgcgggaagccaccaaagtcatgaatcgtgggcggcgtctccatcgcggtcactcctgttccacgggtaaaccagtgagcgctaaccaccacaatcgcttgcgggcgtggcaatgtcatccccaacttctgccagctgcgggtatacaaattatcttccagcacgttcatcggactaccgtgacctaaaaacaatgctggcatacgtgtactagacatgatgatatccttaactaaaggtgtcattttgatatcctcacaatacgcttgttcggcggagtaagaacccggataacaatgatgatgatcatcagttattttgacgatctgcctgaaggtgaagatttataaggagttgtcgatgagtgtacctctcattctgaccatactggcgggggcagccacgtttattggcgcgtttctcggcgttctcgggcaaaaacccagcaaccgcttactggcgtttagcctaggttttgcggcggggatcatgttgctcatcagtttaatggaaatgcttcctgccgcactagcagctgaaggaatgagccctgtgttgggttatggaatgtttatcttcggtctgcttggctattttggcctggaccgcatgttgccacatgctcatccgcaggatttaatgcaaaaaagcgtgcagccgttgccaaaaagcatcaagcgcacagccattctgctcactctcggcatcagtctgcataacttcccggaagggattgccacctttgtcacggcgagcagcaacctggagctgggatttggcatcgcactggccgtcgcgttgcacaatatccctgaaggtctggcagtggcaggcccggtttatgcggcaacggggtctaaacgcaccgcgattctgtgggcggggatttctggactagcagaaattcttggtggtgtgctggcgtggttaatcctcggtagcatgatttccccggtggtcatggcggcaatcatggcggcggttgcaggaattatggtggcgctcagcgttgatgaattaatgccgctcgccaaagagattgaccctaataataaccccagctatggcgtactatgtggaatgagtgtgatgggattcagtttagtgctgctacaaacggcgggaattggttaaaaacaacatcagaagttgtccagcgcatggacaacttctgccagcttcacgaaagccttattctaccttttcggctgtctcttctctcgtactgtttaagtatttgttccgcgcttcaagcagtgcgtctctgtcctggcgaaacgcccgacaataacgtttcaaatgcaggaaataacccaccacaaccagagcaatcaatacaatccagtaccaggcgataaacatccttttacccttaatatttaacaatactaaacatttagcgtataaatttcacatatcctttttcggatatattcatatggtcgcataataacggaacaattatatgattttgatcataatgaaaaagaatgcctgatattaatgaaattttctcatagaaagagaagcggaattaacatcttgcatagcagggaaaaataaaaaccgaagcctgctacaacttcggtttcttgattaaggcagtaaattaagcagcggttttcagctggctttacgctcatgtgcctgacggtatgccaccaggtcttcaatagtcacgagcgccatattgtgtttattggcaaactcaatacactctggtgcacgcgccatcgtgccatcgtcattagtcagctcacacagtacaccagccggtttaaagcctgccagcgtcatcagatcaatagttgcttcagtatgaccgccacgcgtcagtacaccacctgcctgagcgcgaagtgggaaaacgtggccaggacgattcagatcactcggttttgcgccatcggcaatcgctgcgcgaacggtcgtaatacggtcagcggcagaaacaccggtagtcacaccttcagctgcttcaatggtcacggtaaaaccggtgccataggcgctggtgttattttctaccatcattggcagatcgagttgtttacggcgatcttcagtaatgcacaggcaaacaataccgctaccgtggcgaatggtcagcgccatctgctcaacagtcatggtttctgccgggaagatcatatcaccttcgttttcacggtcttcatcatcaagcaccattacaccgcgtccttcacgcagcgcagccagtgcattttcaacacgttcgaaaggcgtaccaaaagaggaaagtagcgtctgattcatggtaaaaaaacctcactaaaattatggttaccagaatcagggcagtcttaggagtggcggcatatagccaaaataacgtgagcgggtccatgcccgacagaatcgttactctctcccatccggactctaaccgtcggccccggaattacaccggatctgctgtcctttgagttcgcacccaaagcgctcgcgggctttcaactgagttgatttaccgccggtggggaatttcgccccgccctgagaataagcggattcactataacgctaatgattagcggcagcaacgcatagcttcacataattctggtttatatctaatacaaacactaaaacgggccatcaggcccgttatatcagtgctctaactccagctctcttgcctgcatcatctgttgacaataccaggcataacgtgcgcaaaaccaggttctatgttcttcatccatgttaccagtaacggccagaatatcgaccgggcgaccttctgcgtgcattctggcaaaactacgcgccaggaaatcgaaattatttaaagaattaagactatgatccataagcacatcctccggttatcgcataccttttaaggccatatgctttttctgatttcagtattccccaatcagtgtagtgcctttaaacataacgtgcgtaaatatattgtccccgatcacactttttagtgaaaaataaaaaaccatattaaaagactttctcttccagaacttctctaacctgtgttattattaacacagataaatgtaagcaaggaaactattacaaagtaaatattgcgtcactaaatggacattggagtgatatatgattttattcgccgactataacaccccttatcttttcgctatttcctttgtactgttgatcggcctgttagaaatttttgcgcttatctgcggtcacatgctctccggtgctcttgatgcacatcttgaccattatgattctataaccacaggtcatattagccaggcacttcattatctcaatattggaagattgccagctctcgtcgttctctgcttactggctggtttttttggtcttattggcatcctgttgcagcatgcctgcatcatggtctggcaaagtccactgagcaacctgttcgtggttcctgtcagtttactgtttacgattattgcggtgcattataccggtaaaatagttgcgccctggattccacgcgaccatagtagtgctattacagaagaagaatatattggtagcatggcgttaattaccggtcatcaagccactagtggtaatccctgcgaaggaaaactcaccgatcaatttggccaaatacattatttactactggagcctgaagaaggaaaaattttcactaaaggagacaaagtgttaattatttgccgactttctgcaacgcgatatttggcggaaaataatccctggccccaaatattgtaatttattaatcaaaaggaaatttaataatggatgatattgttaattctgtgccctcctggatgtttaccgcaattattgccgtatgcattctgtttattattggaattattttcgccaggctctatcgtcgcgctagcgcagagcaagcttttgttcgtactggtttaggtgggcaaaaagtggtaatgagcggtggcgcaatcgtgatgccgatctttcatgaaataatccccatcaatatgaatactctgaagctggaagtcagccgcagtaccattgatagcctgattacgaaagatcgtatgcgcgtcgatgtagtagtcgctttctttgtgcgggtaaaacctagtgtagaagggattgccaccgctgcccagacgctggggcaacgcaccctgagccctgaagacttacgtatgttggttgaagataaatttgtcgatgccctccgtgcaacagctgcgcaaatgaccatgcatgagttacaggatacccgcgagaactttgtgcagggggtgcaaaatacagtggcagaagacctgagcaaaaacggtctggaactggagagcgttagtcttaccaactttaaccagaccagcaaagaacatttcaatccgaacaatgcctttgacgccgaaggtttaaccaaactgactcaggaaacagagcgccgtcgccgcgaacgtaacgaagttgaacaggatgtagaagttgcggtgcgtgaaaaaaatcgcgatgcgctaagccgcaagctggagattgaacagcaagaagcgtttatgacgcttgagcaggagcagcaggttaaaacccgtactgccgaacagaatgcacgtattgcggcttttgaagctgaacgtcgtcgtgaagcagagcagacacgaattctggctgaacgacagattcaggaaacagaaatcgaccgcgaacaggccgtccgcagtagaaaggttgaagctgaacgtgaagttcgcattaaagagatcgaacagcagcaggtcaccgaaatcgctaaccagacgaaaagcatcgctattgccgccaaaagcgaacaacagtcccaggcagaagcgcgtgctaatctcgcacttgcagaagcggtaagcgcccaacaaaacgtagaaaccactcgccagactgccgaagccgatcgtgctaaacaagttgccctaatcgctgccgcgcaggatgcagaaaccaaagcggttgaactgaccgtgcgggcgaaagcagaaaaagaagccgcagagatgcaggcggcggctatcgttgagttagccgaagctacacgtaaaaagggtctggcggaagcagaagcacaacgtgcgctgaacgatgctatcaacgtactttctgatgaacaaaccagccttaaattcaaactggccttgttgcaggcgctgcctgcggtaatagagaaatccgttgagccgatgaagagtatcgacggtatcaagattattcaggtcgatggtctgaatcgtggcggcgctgcgggtgatgcaaacacgggtaatgtggggggcggaaacctggcggaacaagcattaagtgccgctctctcttaccgcacacaggcaccgctgattgactccttgctcaatgaaattggcgttagtggcggcagtctggcggcattgactagtcccttaaccagtacaactcccgtcgaagaaaaagcagagtaaaccctcttccaggaataatccctggcccaaaaagccggggattttttatatctgcgttccgctaaaaagtgcaaatgatcaggttgttgcagcattttgcgtgacggctcggggaaggcaaaactgcatcagagaaagcattgcgtggggtctggcgctcatcaacaatcggggagtcagcagggggctgaaacgggaaagcccctcccgaagaagggggccttacagaaggaaagggttatgatgaagctcgtcatcatactgattgtgttgttactcgtaagtttcgcagcttattaacagccaatcagaggggggagaaatcctccctcacccttgttcctttactttaggttgaaaaaaaatcagcgtcaagaaggtttcattaacacatatccctggcccaaaaagccggggattttttatatctgcgttccgctaaaaggtgcaaatgctcaggacgttgcagcgttttgcgtgaccgctcggggaaggcaaaattgcctctgggaaagcattgcgcggggtccggcgctcatcaacaatcggggggcagcaaggggctgaaacgggaaagcccctcccgaagaaggggccttgtataaggaaagggttatgatgaagctcgtcatcatactggttgtgttgttactgttaagtttcccgacttactaacaactcatcagaggggggagaaatcctcccttacccttgttcctttactctaggttgaaaaaacaacagcgtcaataggcctgccatgtacgaagcgagatctgtgaaccgctttccggttagccttttttatcctgttggatcttcttgatgatgttggtcgtgctgcaaccgtcttcaaagttgagcaccaacacttcgccaccgttggcccagacttctttactcccggcaatctcttctggtttatagtcgccgcctttcaccagcagatctggcaagatcccggcgatcaagcgctgcggcgtgtcctcttcaaagctcactacccagtcgaccgcttccagtgcgcccagcacaatcatacgctgttcgagtgggtttaccgggcgggaatcccctttcagccgtttggtggaggcatcgctgttgacggcaacaatcaagcggtcacccagcttgcgggcatttgccagataagagacgtgcccggcgtgcaggatgtcaaagacaccgttggtcatcaccactttttcaccacgtttacgcgctgccgctacggccagcttcagttcctcttcggtcatcacgccaaagcctgtatctgcacgtccacgtacagcattttccagctcgatcgggctaaccgtggaggttcccagtttgccgaccaccacgccagccgccgcattggcaaagaagcaggcttcttccaggctattacccgctgccagcgttgccgccaggacgccaatcaccgtgtcgcccgcaccggtaacgtcatacacttcctgcgcttgggttggcatatgcagcggcgctttacccggttgcagcaggctcataccctgttcggaacgggtcactaacagagcgctgagttcgtaatcggcaatcagtttcatgccgcgctcaacaatctcttcttcggtcttacatttaccgacaacagcttcaaattcgctgagattcggcgttaacagcgtagcgccgcggtagcgctcaaaatcggtaccttttggatcaatcagcaccggaacacccgctttacgcgccagttggatcatctgctgtacgcttgccagcgcacctttggcgtagtcagaaagcaccagcgcgccaatgctactcagcgcctgattaatccgctcgtgcagcggctgcggatcaacaccttcgaaaccttcttcaaaatccagacggatcagctgttggttgcgggaaagtacccgtaatttggtaatggtcggatgcgtcggtacagaaacgaagtcgcatttgacgttgacgtcggccagagatttactcagcgcgcgcgctgcatcgtcaatgcccgtcaacccgaccaggcgtgcattagcaccgagagaagcgatattcatcgccacgttagccgcgccgcccggacgttcttcgatggtattcactttaaccacgggcaccggcgcttccgggctgatacgactggtggggccgtaccagtaacgatccagcatcacatcaccaaccaccatcactcctgcacgttcaaactctggcagcgttactttcattcctgtctcctgagagattcaaaatttgcgcgcgataataccatacttcattcttccaccagccacttctgccagcttgcccgcaccagttcacgctctgcggtgaagcaatcctcgctcacatggcccggcaattcctgtaatgccagatgatgaagttcatcgcgaagcgtagtgtaagcacgggtcagcgccatcgcttcctgctcttccataatgtcgttttgcgccagtagttccagaatacgcacgttgtcactccagcgcgttaacttcggtttttcatgagcgtagcgcaacaccagatattgggtaataaattcgatatcggtaattcccccttcatcagctttgatatcaaagcgatcgcgatgtttattgccgagatgagcgcgcattttctcgcgcatttcccgcacttccgtttgcagagttttaccttcacgcggcagcgtcataatctcgcgacgcactgcgtcaaagtgcgcggtgagctgcggatcgccgtacactacacgcgcacgcaccagcgcctgatgttcccacgtccaggcctcgtttttctgataatcggcaaatgcttctgcggatgtcaccagcattcccgccgccccggacggacgcagtcgagcatccacttcatacaaaatgccggaagaggtacgcgtactgaacagatgcataatgcgttgcgccagacgcagataaaactgccgcccgtcgatttcccgctcaccgtcagtcatcgcatccattgggcaatcatggaggaagataaggtcaagatcggaactgtagcctaactcccagccgcccagcttgccgtagccgaccaccgcaaaaccacgcccttcgcgttcgttcaggtgattcggcttaccgtagcgggcaaccatttgaacccacgcctgctgaacgacggcatctatcatggcttccgccagccaggttaagtgatcgctcactttcatcaccggtagcgtaccggcgatatccgctgcggcgatgcgtaacagctgcgcctgtttgaactgacgcagcgcctcaagctgttgctcttcgtcatcttccggcacgcgcagcaaatactggcgcaactcatcgcggtaggcatcggtcgccgtcggctggtaaagggtgtttggatcgagcaattcatccagcaataatggataacgcgccagctggctggcaatcatcgggctcgcggcacacagagaaatcaaatgtttaagcgccgcggggaattcactgagcaattctaaataggtggtgcgggtaacaatccccaccagcaaggcggtaatgcggctcagcgtaacggcagcgtcttcacgcgcacagacatcacttagcagatgcggcatcagatggtcgagcacctgacgtcctcgcggcccgatggtgcgcttatccagctctttgcggaaatcggcaatcagcgttagcacctgtttgcgatcatcctcgctaagatgcgccagcactggcgtagtgtcatcttcctgcaacgcatcctgccacagctcacgccactgttcgctcaggctctcttcctgagtttcactttcatcgtcgccaatcaattcattaaacacccggcgcacattggtcatatgtgcggtcagcgccccggtcagttgcggccagtcagcaaagtccatcgcccacgccagccgcgcacgattaagctcatcagaaggaagcgtctgggtttgttcgtcgttaatgctttgcagcaggttttccagacgccgcaggaacagatacgccactcgcaattgttcagcatcgttttcagaaagcagatgcagctcggcaatggcgctgagcgttggcagtaaagagcggctttgcaggctcggttcgcgtccgccgcgaatgagctggaacacctgaacgataaattcaatttcgcgaatgccgcctgcgccgagtttgatattgtcggtcaaaccacgtcgacgcacttcacgggcaatcatccctttcatgttgcgcaggctctgaatcacgctgaaatcgatgtaacgacggaaaacaaacgggcgcagcatcgcacgcaactcgttagcatagacgccttcgctatcgcccataatccgcgccttgaccatcgcgtaacgctcccagtcgcgcccctgctcctggtaataatcttccaacgcggcaaagctcagcaccagcgggccactttcgccaaacggacgcagccgcatatccacgcgatagacgaagccatcctgcgttggttgatccagcactttaatcagccgctgccccatgcgggtaaaaaactgcgcgttatccagttcccggcgtccaccctgcgtacaaccatgttccggccaggcaaaaatcagatcgatatcagaggagaaattcagctccccaccgcccagcttacccatgcctaaaatcagcagcggttgcgcttcgccctgcgcattgcacggcgttccccactcgcggcagcaggcgtcatacagccagtcacgcgccgcaacaatcagcgtctccgccagatagctgagctgctgcaatatgctctcttcagtaaccagtgccagcgtttgcgcccaggcgatgcgcaccataatgcgccgccggaatagccgcagctcgcgcattaacccggcttcgtcactcacattacagagcgcctcctgcaaccatgccgcgtaatgctgccattcgtcggcctgcggcggttggctttccagttccgtcagccactctggatgcgcaatcacgctgtcctgcacaaaatcactaaaagtaagtacactcttcgcctgtgcgctaagactttcctcggctaaaggctctggcagccgctcaacaacggtctgccagtactgctgtaacggactagagagcggcttcataagcgattttatccttgcctgattaacgttttccgctgtgcaaccagaacggttcctgattgtttgcctcattacggaaatgttcaatttcgatgcgttgcccggtcgcaatagcgtgatgcagcccctgccagttctccagccaggcttgcgcgacgacaggatcatagtaacccgccagcaacagtatactgtcaatatcacgcgtcaggcgtggcaactggtcacggtagcgatcgcctaacggctggcagaaaacgcttttcagttcagcggcatggcgggaaagatggatatcggcaaagcgtttgaaggagtcgctgattttgccctgcgctttggcatctaaaaatggctgccatgctttgcttaccaaccattcggtcaacgccagcttcgccattgccgtttcggtagagtagaccgccgtcacggcagacaccgcagaagcaatggtcgcctcgcattgagtcagcagatcacgtaagtgagtgctcgctttacgcggcacaataccaccgaacagcatcagcgtatgacggaccaggctaatggctgccagcacctgttctttcgccgcatcgttgccgcgtacccacagttcttcatgatactgccattgcgctaacgccagctcgagcgccgcttccagcccctgttccacatcggcttttgccgcaacatgcaaaatggtggtcggtttgatttcacgcgccggattgccctgcgccagatgatagccacgcgccgctttgctcaggctgccctggcgtaatccggtttggcttaccagttggttcgccagtttcagcaccgcgcgcgtgtcgccgctaagcagttccagttccagctcacagataggttcagcaaattcacccgctttcacttccccctggtcgagggcgatttcaatttggctaccatcgaccgccaccagccatttttcgcgataaaaatcggtgctgaacagcggctgcacgcgggaggcgagatcggcgggcaattcgccgttcggccagacttccgtcggtaactgcgccaggtcgagcgtcggttcgctcaacgccacgttatattccgggcgctgatgtaagccgcctgtcactcttcctgcaactttcatggtcatctcatagcgaccgttttcgccacgaatacgtaagcccatatcgtgcccacgcagccagttatccggcgtttcgtagtaaatattcagcaactgcacggggtcatggtgctcgccgcccagcgtattgagatggtcacgcaacgcctcaacggcactgtgattaacaataaactttaattcgatttcctgagccatggcctttacttatcggttatgtcacataagtgacgatgaacggcgaacttaatgcgatcttttttgtcagtagatagtattttgcgccaaattgccatgcaacgggcaatttgacgggcgtaaaagtttgaagcagtggcaagacctgacacagaggattccgattgatgtcgaatgctttgcgtagcgacactgatgccactactatcgttccactttccatgacaataacgacagcctgatgccaaaattacgcctgatcggattaactttactcgcacttagcgcgactgccgtcagtcacgctgaagaaacgcgctatgtttccgacgaactgaatacctgggtccgcagcggtccgggagatcattatcgcctcgtgggcacggttaacgccggcgaggaagtgaccttattacaaactgacgccaacaccaattatgcccaggtgaaagacagctctggccgtaccgcctggatcccgttgaaacaacttagcactgagccaagcctgcgctcccgtgtgccagatctggaaaatcaggtcaaaaccctgaccgataaactcaccaatatcgataacacctggaatcagcgcaccgcagaaatgcagcaaaaagtggcgcagagcgacagcgtgatcaacgggttaaaagaagaaaatcagaaactgaaaaacgagctgattgtcgcgcagaaaaaggtcgatgccgccagcgtacagctggatgacaaacagcgcaccatcatcatgcaatggtttatgtatggcggtggcgtgctggggcttggcttgctgctcggtctggtactgccgcacctgatcccaagccgcaaacgcaaagatcgctggatgaactaaatcgccttcttcgttgcactgtcttattattaggaattgtgtatttgacgaagggatgatggcgtgaagatttatctggtcggtggtgctgttcgggatgcattgttagggctaccggtcaaagacagagattgggtggtggtcggcagtacgccacaggagatgctcgacgcgggctaccagcaggtaggccgcgattttcctgtgtttctgcatccgcaaacgcatgaagagtatgcgctggcacgtaccgaacggaaatccggttccggttacaccggttttacttgctatgccgcaccggatgtcacgctggaagatgatcttaagcgtcgcgatctgaccattaatgcgctggcccaggacgataacggcgagattatcgacccgtacaacggtctgggcgatctgcaaaatcgtctgttgcgccatgtttcccccgcttttggcgaagatccgttacgcgtattgcgcgtggcgcgttttgctgcgcgttatgcccacctcggttttcgtattgccgatgaaactctggcgttgatgcgcgagatgacccatgcgggtgaactggaacacctgacgcctgaacgggtatggaaagagacggaaagcgccctcaccacccgcaatccacaggtgttcttccaggtactgcgcgattgcggcgcactgcgcgttttattcccggaaattgacgcactgtttggcgttccggcccctgccaagtggcatccggaaatcgatacgggtattcataccttaatgacgctcagtatggcggcgatgctgagtccgcaggtcgatgtccgtttcgcaactttatgccacgatctcggtaaagggctgacgccgccagaactctggccgcgtcatcatggtcatggcccggcgggtgttaagttagtggaacaactatgccagcgtctgcgcgtgccaaatgaaattcgcgatttagccagactggtggctgagtttcacgatctcatccacaccttcccaatgctgaacccaaaaaccatcgtcaaattatttgattccatcgatgcctggcgtaaaccgcagcgtgtcgagcaactggcgctgaccagcgaggctgacgtgcgcggcagaaccggttttgaaagtgcggactacccgcaaggccgctggttgcgcgaagcctgggaagtggcgcagagtgtgccgacaaaagccgtcgttgaagcgggatttaaaggtgtggagattcgcgaggagctgacccgacggcggattgcggcggtagccagctggaaggaacaacgttgcccaaagcctgaatgagtattgggcattttgccggatgcggcgtaaacgccttatccggctacatgtcaacgacagttgtaggcctgataagacgcgcaagcgtcgcatcaggcgttgattgccggatgcggcgtgaacgccttattcggcctacgcaatcgttgacaacgccaagcatccgacactattcctcaattaaaagaacacgacatacaccgcagccgccacaataaagcgataaatggcgaacgggataaagctaatgcgcttaatcaattgcaggaaggttttaatcgctatcagcgccaccacaaaagcggtgataaacccaacggcaaacatcgggatatcgccgcttgtcaggaagccccagcttttgtagagatcgagcgccgttgcgcccatcatcatcggcaccgccagcaggaagctaaactcggaagcagcgtaacggctcacccccatcagcatcccaccactaatggtcgccccggaacgggagaaacccggccacagcgccagacactggaaacagccaatcataaatgcctgacgataggtcatatcatcaagacccggcgcacgcggctctttcggcttcaggcattcggcggcaatcagcaacaaaccgccaacgaccagcgcatacatcacatttatcgggttaaacaaactcttaatcgtgtcgtggaacaacagccccaataccaccgccggaatcatccccagcaaaatgtggatcagcgttaaacgacctttgctttcaccttcgtgctgcaacgggcggccaaagtggatgccaatcaggccaaacagacgccgccagaacatcactactaccgccagaatacttcctaactggatcacaacttcaaaggttttcgccgtgtcgccctcaaaccccaacaagtgaccgacaataatcatatggcccgtgctggataccggcagaaattctgtcaatccttcgaccacacccaatattgccgctatcagcaggctgtgcatatcgctcatcaataaacccctaaattattaaaatgtaccgcttgtccgaactactgcgtatgaccaggttataaccgtttggtttaacagctgtaaaattaattattttctttcagattattgccacgctcaatgattacgccaacattcgccgcccgcgccactgcgcctggcttgctgagtttgatacgcacccacgggctgttgaagcgtgctaacagcagctccgccacctcttcagccacgcgttccaccagcgcaaaacgcgccccctcgacgtggctgaccaccgtttctgcaatgtcagcgtaactgaggcaatccgccacatcatcacttttcgccgctttacggttatcccacgccatttcgatatcgaacactaacttctgttcgatggtctgttcccagtcgtaaacaccaatagtggtgattacgctaagttgctctataaatacaatatccatcacgtcctgcctgctttttggctaaccggataccacttccggcgaaatgtgcgtattatccacagattcatcgttgaacacgaattttcaaaacggaacagcttatgagtgcaatcgcgcctggaatgatcctcatcgcgtacctctgcggctccatttccagtgccattctggtttgccgcttgtgtgggctgcccgatccgcgaaccagcggctccggcaatccaggcgcaaccaatgtgttacgtatcggtggcaagggagcagccgtagcagtactgattttcgacgttctgaaaggaatgttgcccgtctggggcgcgtatgaattaggtgtcagccccttctggctaggcttaattgccatcgccgcctgtcttggacacatctggcccgttttcttcggatttaaaggaggaaaaggcgttgctaccgcttttggtgccatcgcacccattggctgggatctcaccggagtaatggcgggaacctggttactgaccgtgctattgagcggatacagcagcctgggagcgattgtcagtgcactgattgctccgttttatgtctggtggtttaagccacaattcaccttcccggttagcatgctctcttgcctgatcctgctgcgtcatcatgacaacatccaacgtctgtggcgtcgtcaggagacaaaaatctggacgaaattcaaaagaaagcgcgaaaaggatcccgagtgatttctggtggatttacatgacctgatagccttcatcgggcttgcccagccgttgctggcaccatgccgccagaaattccacgcagacacgtaatttcatgctgcgatagagcggctcccggtaaacagcccagatattggcgctttgtgcatactctggcaatacttgcaccagtttgccactctccagaaacggcaacacatcccactcggaacgcagcataatccctttgccctccagcgcccattgcagcacaatctcgccgctattggaggaaagatgcccgcttaccttcacgctttttttctcctgaccgttccccaactcccatattccatgggtcatatcgcgctctttggtcaccagacagtcatgacgacttaattcctgtagggattgtggctgcggatatttttgcagatactcaggtgctgcgcataatattcttttattttttgtcaaaagatgcgcaatataataatcaggaatttcgtcattaatacgaatatccagatcaatattatcctgcactaaatcaatttgccgatcgaacaattcaaaatgcacctgtaactcaggataattgcgcatcagttcggtaatagctggcgcaatatggctgcgcccaaaaccaaaactgcaaccaatacgaatcatcccctccgggcgcgttttgatttgcgtgacgtcatcgaccagtcgctgatattgggtgaggatttccaacgcatgttcgtaacaacgttggccactttcagtcagcgccacgccgcgagcggagcggttcagcagcgttgttgccagcgtattttcaaggatttggatccgcttggtgacaaatgcaggcgtctgcccaagcgtcgccgctgcggcgctaaaactcccgctgtgaacgatttctaccagtacctgcaagtctttggctaaaggccagctattcagcatcgttaattatccgcagttgtgataagcgcagtgtatttcgcaaaacattgccattccctgctctggcgcaatattcattcttattttcgcgttgattcacgaactgttaattacatattcacggtggcaaaaaatataaaaccacatttttagtggtagtttgtggcggtgaatttttccagacaaatacaaaaactggagttgccatgatgagcgaaagtaataagcaacaggcagtgaataagttgacagagattgtcgctaactttaccgccatgatttctacccgaatgcctgatgacgtggtggataaactaaaacagctaaaggatgccgaaacgagcagcatggggaaaattatctaccatacgatgttcgacaacatgcaaaaagcgattgacctgaatcgtcctgcctgtcaggacaccggggagattatgttcttcgttaaagtcggttcccgcttcccactgcttggcgagctgcaaagcatactcaaacaagccgtggaagaggcaaccgtcaaagcgccactacgtcacaatgcggtagaaatttttgacgaagtaaacaccggcaaaaataccggtagcggcgtaccgtgggtcacctgggacatcatccccgacaatgacgatgcggaaatcgaagtttacatggcaggcggcggctgcacgctacctggccgcagcaaagtgttaatgccgagtgaaggctacgaaggcgtggtgaaattcgtcttcgaaaatatctccaccctcgccgtaaacgcctgtccaccggtactggtgggcgtgggcatcgccaccagcgtggaaaccgccgccgtactcagccgtaaagccattttgcgcccgattggcagccgccatcccaatccaaaagcggcagaactggagctacgcctggaagaaggactcaaccgtctggggattggtccacaagggctgaccggcaacagtagtgtgatgggcgtacatatcgaatctgccgcccgccatccgagtaccatcggcgttgctgtctctaccggctgctgggcgcatcgtcgcggcacgctgctggttcatgccgatctcacctttgaaaatctgtctcacacccggagcgcgttatgaaaaagatcctgacaaccccgatcaaagctgaagatctgcaagatattcgcgtcggcgatgtgatctacctgaccggtacgctggtgacctgccgcgacgtttgtcaccgccgtttgatcgaactgaaacgtccgatcccttacgatctcaacggcaaagcgattttccacgctggccccatcgtgcgcaaaaacggcgacaaatgggagatggtctccgtcggcccgacaaccagtatgcgtatggaaagttttgaacgtgaatttattgagcagaccggcgtgaaactggtggttggcaaaggtggtatggggccgctgaccgaagaaggctgccagaaattcaaggcgctacatgtgattttcccggcaggctgcgcggtgctggcggcaacccaggtggaagagattgaagaagtgcactggacagagctcggaatgccggagagtctgtgggtctgccgggtcaaagagttcggcccgctgattgtctctattgatacccacggcaacaacctgatagccgaaaacaaaaagctgttcgccgaacgccgcgatcccatcgtggaagagatctgcgagcacgtccattacatcaaataaccctcccggagaggctcacccctctcctttttcgcaggcataacacgatgaaaccttccactgaatggtggcgatatcttgcgccgctggcggtcatcgccattattgctctacttccggttcccgcagggctggagaaccatacctggctctactttgccgtttttactggcgtgatcgttggactgatcctcgaacccgtgccgggtgccgtggtggcgatggtgggtatatccatcatcgccatactctctccctggctgctgttcagcccggagcagctcgctcagccaggctttaaattcactgcaaaatccctcagctgggccgtttccggtttttctaatagcgttatctggctgattttcgccgcctttatgtttggcacaggctatgaaaaaaccgggcttggacgccgcattgcgctgattctggtgaaaaagatgggacatcgcacgctgtttctcggctatgcggtgatgttctccgagctgatcctcgcacctgtaacaccgtccaacagcgcgcgtggtgcggggattatctatcccatcatccgtaacctgccaccgctctatcaaagtcaaccaaacgacagcagtagccgcagcattggcagctacatcatgtggatggggattgttgccgactgcgtgaccagcgccattttcttgacggcgatggcaccaaacttgctgttaattggactgatgaaaagcgcatctcacgccacgctgagttggggcgactggttcctcgggatgttgccgctcagcattttactggttctgctggttccctggctggcttacgtgctgtacccgccggtactgaagtctggcgatcaggtgccgcgctgggcagagacggaactgcaggcaatgggcccgctctgtagccgtgaaaaacggatgctggggctgatggtaggcgcgctggtgctgtggattttcggcggtgattatatcgatgccgcgatggtcggttacagcgtggtggcactgatgctgcttctgcgcattatcagttgggacgacattgtcagtaataaagcggcgtggaacgttttcttctggctggccagccttatcaccctcgccaccggactcaacaacaccggttttattagctggtttggcaaactgttagcaggcagcttaagcggttatagcccaacgatggtgatggtggcgttgattgtggtgttttatctactgcgctactttttcgccagcgccacggcgtatacctccgctctcgcaccgatgatgattgctgctgcgctggcgatgccggaaatcccgctgccggtgttctgcctgatggttggtgcggcaattggtctggggagcattcttacaccatacgccaccggccccagtccgatttactacggcagtggttatctgccaacggcggattactggcgactgggggcgatttttgggctgatattcctcgtattgctggtgattaccggcttactgtggatgcccgtggtgttgctttaagtgaggacggtgccggaaattgctctccggcacccaatagttttacgcagccggtaactccgccagcggccagcgcggacgcacgctaacgccgagatccgccgtcgcgcctgctttaaaccgcaccattccggcataggcgatcatcgcgccgttatcagtacaaaattccggacgcgcgtagaacacttcgccgcggcgttttttcatcatttcagccagcttcgcccgtaacgtacggttagcactcacgccgcccgccatgaccagtcgcttaaagcccgtctgatccagcgcccgcttgcacttaatcatcagcgtatcgaccaccgcatcttcaaaggcgcgggcgatatcagcacgcgtctggtcgtcggtgccgttgtcacgaatggtatttgccgcgaaggttttcaggccggagaagctgaaatccagccccggacggtcggtcatcggacgcgggaagacaaagcgcccggcagtaccctgagccgccattttgctcagtaacggcccgccaggataatccagccccagcagcttcgcggttttatcaaacgcttccccggcggcatcatcgatagactcgccgagcagctcgtactgaccaatgccagtcacgctgattaactgcgtatgaccgccggaaacaagcagcgcaacaaacggaaattccggcgggttatcttccagcatcggcgctaacagatgcccttccatatggtgtacagggatcgccggaacgtcccaggcaaacgccagagaacgccccacggtcgcgccaaccagtagcgcgccgactaatccagggcctgcggtataggccacagcatcaatgtcttttgccgttaaaccagactcctttagcgccgcctggatcaacggtacggttttacgcacatgatcgcgggaggccagttcaggcacgacgccgccgtagtcagcgtgcaatttcacctgactatacaattggttggctaacaaacctttttcatcgtcgtaaatggcgatgccggtttcatcgcaggaagtttcaatacccagtacacgcatgacttgttttacctcgctttattaccgcgcagtgtaggaccaatgcgggttgatgtaaaactttgttcgcccctggagaaagcctcgtgtatactcctcacccttataaaagtccctttcaaaaaaggccgcggtgctttacaaagcagcagcaattgcagtaaaattccgcaccattttgaaataagctggcgttgatgccagcggcaaaccgaattaatcaaaggtgagaggcacatgccggtaattaaagtacgtgaaaacgagccgttcgacgtagctctgcgtcgcttcaagcgttcctgcgaaaaagcaggtgttctggcggaagttcgtcgtcgtgagttctatgaaaaaccgactaccgaacgtaagcgcgctaaagcttctgcagtgaaacgtcacgcgaagaaactggctcgcgaaaacgcacgccgcactcgtctgtactaattccccgagagcgttgctctccgatcagaccgagttgtagttgtaaggccgtgcttccgaaaggaatgcgcggcttattttcgtttatgaattgctaaaaatcggggcctatggctggacgaatcccacgcgtattcattaatgatctgctggcacgcactgacatcgtcgatctgatcgatgcccgtgtgaagctgaaaaagcagggcaagaatttccacgcgtgttgtccattccacaacgagaaaaccccgtccttcaccgttaacggtgagaaacagttttaccactgctttggatgtggcgcgcacggcaacgcgatcgacttcctgatgaactacgacaagctcgagttcgtcgaaacggtcgaagagctggcagcaatgcacaatcttgaagtgccatttgaagcaggcagcggccccagccagatcgagcgccatcagaggcaaacgctttatcagttgatggacggtctgaatacgttttaccaacaatctttacaacaacctgttgccacgtctgcgcgccagtatctggaaaaacgcggattaagccacgaggttatcgctcgctttgcgattggttttgcgccccccggctgggacaacgtcctgaagcggtttggcggcaatccagaaaatcgccagagtttgattgatgcggggatgttggtcactaacgatcagggacgcagttacgatcgtttccgcgagcgggtgatgttccccattcgcgataaacgcggtcgggtgattggttttggcgggcgcgtgctgggcaacgatacccccaaatacctgaacagcccggaaacagacattttccataaaggccgccagctttacggtctttatgaagcgcagcaggataacgctgaacccaatcgtctgcttgtggtcgaaggctatatggacgtggtggcgctggcgcaatacggcattaattacgccgttgcgagcttaggtacgagtaccaccgccgatcacatacaactgttgttccgcgcgaccaacaatgtcatttgctgttatgacggcgaccgtgcaggccgcgatgccgcctggcgagcgctggaaacggcgctgccttacatgacagacggccgtcagctacgctttatgtttttgcctgatggcgaagaccctgacacgctagtacgaaaagaaggtaaagaagcgtttgaagcgcggatggagcaggcgatgccactctccgcatttctgtttaacagtctgatgccgcaagttgatctgagtacccctgacgggcgcgcacgtttgagtacgctggcactaccattgataagccaagtgccgggcgaaacgctgcgaatatatcttcgtcaggaattaggcaacaaattaggcatacttgatgacagccagcttgaacgattaatgccaaaagcggcagagagcggcgtttctcgccctgttccgcagctaaaacgcacgaccatgcgtatacttatagggttgctggtgcaaaatccagaattagcgacgttggtcccgccgcttgagaatctggatgaaaataagctccctggacttggcttattcagagaactggtcaacacttgtctctcccagccaggtctgaccaccgggcaacttttagagcactatcgtggtacaaataatgctgccacccttgaaaaactgagcatgtgggacgatatagcagataagaatattgctgagcaaaccttcaccgacagtctcaaccatatgtttgatagcctgcttgaactgcgccaggaagagttaatcgctcgtgagcgcacgcatggtttaagcaacgaagaacgcctggagctctggacattaaaccaggagctggcgaaaaagtgatttaacggcttaagtgccgaagagcgatcgggaagcccccgacagccgcactgagaggcagcggcaaatatataagtacgccctcgtaattatcgttggcggtaaacaaccgttggatttcagcgttaacggctgaaggacatcgggtcaatcgcccaacaccaacctcatgaaataagtgtggataccgtcttatggagcaaaacccgcagagtcagctgaaacttcttgtcacccgtggtaaggagcaaggctatctgacctatgccgaggtcaatgaccatctgccggaagatatcgtcgatagtgatcagatcgaagacatcatccaaatgatcaacgacatgggcattcaggtgatggaagaagcaccggatgccgatgatctgatgctggctgaaaacaccgcggacgaagatgctgccgaagccgccgcgcaggtgctttccagcgtggaatctgaaatcgggcgcacgactgacccggtacgcatgtacatgcgtgaaatgggcaccgttgaactgttgacccgcgaaggcgaaattgacatcgctaagcgtattgaagacgggatcaaccaggttcaatgctccgttgctgaatatccggaagcgatcacctatctgctggaacagtacgatcgtgttgaagcagaagaagcgcgtctgtccgatctgatcaccggctttgttgacccgaacgcagaagaagatctggcacctaccgccactcacgtcggttctgagctttcccaggaagatctggacgatgacgaagatgaagacgaagaagatggcgatgacgacagcgccgatgatgacaacagcatcgacccggaactggctcgcgaaaaatttgcggaactacgcgctcagtacgttgtaacgcgtgacaccatcaaagcgaaaggtcgcagtcacgctaccgctcaggaagagatcctgaaactgtctgaagtattcaaacagttccgcctggtgccgaagcagtttgactacctggtcaacagcatgcgcgtcatgatggaccgcgttcgtacgcaagaacgtctgatcatgaagctctgcgttgagcagtgcaaaatgccgaagaaaaacttcattaccctgtttaccggcaacgaaaccagcgatacctggttcaacgcggcaattgcgatgaacaagccgtggagcgaaaaactgcacgatgtctctgaagaagtgcatcgcgccctgcaaaaactgcagcagattgaagaagaaaccggcctgaccatcgagcaggttaaagatatcaaccgtcgtatgtccatcggtgaagcgaaagcccgccgtgcgaagaaagagatggttgaagcgaacttacgtctggttatttctatcgctaagaaatacaccaaccgtggcttgcagttccttgacctgattcaggaaggcaacatcggtctgatgaaagcggttgataaattcgaataccgccgtggttacaagttctccacctacgcaacctggtggatccgtcaggcgatcacccgctctatcgcggatcaggcgcgcaccatccgtattccggtgcatatgattgagaccatcaacaagctcaaccgtatttctcgccagatgctgcaagagatgggccgtgaaccgacgccggaagaactggctgaacgtatgctgatgccggaagacaagatccgcaaagtgctgaagatcgccaaagagccaatctccatggaaacgccgatcggtgatgatgaagatagccatctgggggatttcatcgaggataccaccctcgagctgccgctggattctgcgaccaccgaaagcctgcgtgcggcaacgcacgacgtgctggctggcctgaccgcgcgtgaagcaaaagttctgcgtatgcgtttcggtatcgatatgaacaccgactacacgctggaagaagtgggtaaacagttcgacgttacccgcgaacgtatccgtcagatcgaagcgaaggcgctgcgcaaactgcgtcacccgagccgttctgaagtgctgcgtagcttcctggacgattaatcggtaggccggatcaggcgttacgccgcacccggcactaggccctctgcacaaacgccaccttttcggtggcgttttttatcgcccacgcactaccagcgcctggtccagctcgcgatacgcttcaaccagtttctccagactaacgcgacttaaaccgctgggatttggcagcacccaaatctgcgtgctaccaatggtgagcgtttgtttcccccactgtgcaccgcgctggctgaatccctgttcatatgcttgtttgcccagaatcgccaacgcctgcggctgataatcttcaattttttcaatcagcttacgcccgcctgcgtgtagctcctgcttactaacttcattggcttgcaccgttggacggtctaccagtttggtgacgccacaacgataatccagcagatgctgtgcctcctgcggcttcaactgacggtcggtaaacccggcctgatatatcaccttccagaagcgatttgccggatgagcaaagggaaaaccagtcccggcggaactaagcccagggttgataccgcaaaacacgacccgtaaccctggagccaaaatatcctcaaccatatttactcctttctaacatcaccaggaaaagtataacggattgaaaatacattgtttataaaaacagcaggcgcgcggtaatggctggattgcgacacggagttactttataatccgctaccatggccccttagctcagtggttagagcaggcgactcataatcgcttggtcgctggttcaagtccagcaggggccaccagatatagcaaaggctgacgagaaatcgtcagcctttttctttttatatatcagttactttgcgtgccagtaagccgctgcacgtacccgctgtgggtcatactgttccgcttcaaagcggcggcttaaattcttaacgactttaccttcgccggttatccagatgaagtaatcatcggcagggatttgcatctgcgccagacgcgcatctaccgcctgctcatcatgtgccagccattcgatattaaaaccatcaaggtgcgcgagataatcctgacaggcgttatcccgcacgctaaccagcgcactaacttgcggtttaacggcaagtttgctcaacgtttccaggcggcggcgcaatgcaggcattccggattcatcgcagacatacagctgatacgcgtaatcttccggcaccaccaggctaccgcgcggacctgccaccgtaagtttatcgcccggttgcgcctgcatcgcccagccgctggcgaccccaccgtcgtgaataaagaaatcaatcgccagttcatggcgtagttcgtcatacagcggcgtatagtcacggctcggtgggcgtggtccttccggccagacgatgccctcttccgttaccgttggcggcacaaagtgagcgtcaggttgaggaaagaagagtttgctgtgatcgtcaaagccacggcttgtaaaaccgtccagcgcctcgccgccgaggacaatgcgctgaaaaccggcgctgatgcgctcaacgcgtaacacagtcagttcacggaagcgcagatcattgcgaacgcgctgcgggtagcggggggtgttattcattgttatcgccttcgtgatggtaatcagatatatctaaataaaactcgcaaatgataatgattgttaatcatgataaatgcaagcgatttgtagaactgatatgtctatagtctgataagacgaaccgcctcttctcaggcatcattactcaacgccggatgcggcgtgaacgccttatccggcctacgtgtgagatgagtccacgtttaaaaatcatttttacacttgcaagaacgctcatatcagatataaattagatatatctaattaagcaaaaggaggctgatatgagccatcatcacgaagggtgttgtaaacatgaaggccagccacgccatgagggctgctgcaaaggtgagaagagtgaacacgagcactgcggacacggtcaccagcatgaacacggtcaatgctgcggtggtcgccacggtcgcggcggcggtcgtcggcaacgtttctttggtcacggtgaattacgtctggtgattctggatattctcagccgcgatgacagccacggttacgaattgattaaagcgattgagaatctaacccaggggaattacaccccaagcccgggcgtcatctacccaacgctggattttctgcaggagcagagcctgattaccatccgcgaagaggaaggaggtaagaagcagattgcgctgaccgaacaaggcgcgcagtggctggaagaaaaccgcgaacaggtggagatgattgaagaacgcatcaaagcgcgttgcgttggcgcggcgctgcgccagaacccgcaaatgaagcgggcgctggataattttaaagcggtgctggatttacgcgtcaaccagagcgatatcagtgatgcacaaataaaaaagatcattgcggtgatcgaccgcgccgcttttgatattacgcaactggattaatcgccgcatccgccagtggcgcggtgcaattgccggatgcgacgcttgacgcgccttatccggcctacacccgctacacaccccgcaggcctgataagatgcgccagcatcgcatcaggcattgtgctccaaccgccggatccggcataccgattaatgcagtaccgtcaccgcgtcttccagtcggctggcgcggtgtttcaccatcgcgctcacctgcgcactctcttccaccagctcggcatttttctgggtgatcaggttaagctcatccactgcacgggtcaggctggaaagcccatcggcctgttccagcgtactatggctaatctgggcgatcaactgggtgacgtttttcacctgtgccacaatatcttccatcgtccgtccggcggcgtgtacctgctggctaccggattgcaccttatcagcactggcatcaatcagcttgcgaatatcgttggcagcattagcgctgcggctggctaaatgacgcacttcccctgccaccactgcaaaacctttgccctgttcgccggcacgcgccgcttccaccgccgcattcagggccagaatattggtctgaaacgcaatatcgttaatcaggctagtaatggtgccaatgcgctgggtactgtcggcgatatcgtccattgtcttgatcaccgtggtcatcgcctccccaccctgcactgccgcattactggcagtgatactcagtttatcggcagcgctcgccgtggcagagttctgtttcacgctcgccgccatttggttcatggtcgccaccgtttgctgaacgttatcaactgtctgctgggtatgttcgttcagttcatcggtgcctttcgccagcgtctcactgccatttctgacactggacacctggctactgacatcgttaattagccaacggcacatcaggccaagttgccctaccgcacgtaatgtcagccccagctcatcgctgcgattcagatgctcaacactattacgttctccggtcgccaccttcagtgcctgatgggcaacattttctatcgggcgcacaatctgccattcaaaacaggcgcttgccaacaataccactaacgcacagaggatatacgtcaccaccggggcagcaacaaaccaaagcatggccgccagcaagataaacatcagggtcatcactccacgcgcccgccagcgaagcggtaaactaggcagtttacccagccagcctttacgcaccaccaggcctttatgaatacgcttactggtacgtccggcgttcaacgctttgtacagcggctccaccgccgcgatctcttcatccgtcgcccgggtacgaatgctcatatagccactgatttttccctcgcgcaccatcggtaccgcattggcccgcacccaataatggtcaccatttttgcggcgatttttcacgatgccgctccagggctccccttttttcagggtgaaccacatatccgcaaacgccgcttttggcatatccgggtgacgcaccatgttgtgcggctgcccttgtaactcttgcaaggtatagccgctcacctgcacaaaagtgtcattagcatgagtgatatagctttgcagatcggtagtggacatcagagtggtatcgtccgccagcggggtattttgctgggtgacatacggatgagaagacatgttcgcgtcctgtgcaggttatatggttgttaacttcttgtcagagtttatgtcggccccgctgcggttatctttaaccgattaatttgatttagatcgcaatttgcgatttaaacacaaatctaattccttgatttaaaatactttcactctgttactatacgaaaacgttaattatcttgcccaaaaatcaggcaattattgccctgaaaacgtgcatttgcgcagcaatcatcaaatccatacccgacaaaaaccgtgcaaaataacaacaaatgttaacagatagcattaaatattgcacaaatgataaccgaatttgtgtttatcccgattttcgcgatcgcagccggagtggcgcaatccctgcaatacttaaatcggtatcatgtgatacgcgagcctccggagcatattttgaacaggttacctagcagcgcaagcgctttagcgtgcagcgcccacgccctgaatctcattgagaagcgaacgctggatcatgaggagatgaaagcacttaaccgagaggtgattgaatacttcaaagagcatgtcaatccggggtttttagagtatcgcaaatctgttaccgccggcggggattacggagccgtagagtggcaagcgggaagtttaaatacgcttgtcgacacccagggccaggagtttatcgactgcctgggaggttttggaattttcaacgtggggcaccgtaatccagttgtggtttccgccgtacagaatcaacttgcgaaacaaccgctgcacagccaggagctgctcgatccgttacgggcgatgttggcgaaaacccttgctgcgctaacgcccggtaaactgaaatacagcttcttctgtaatagcggcaccgagtccgttgaagcagcgctgaagctggcgaaagcttaccagagtccgcgcggcaagtttacttttattgccaccagcggcgcgttccacggtaaaagtcttggcgcgctgagcgccacggcgaaaagcaccttccgcaaaccgtttatgccgttactgccgggcttccgtcatgtgccgtttggcaatatcgaagccatgcgcacggctcttaacgagtgcaaaaaaaccggtgatgatgtggctgcggtgatcctcgaaccgattcagggtgaaggtggcgtaattctgccgccgccgggctatctcaccgccgtacgtaagctatgcgatgagttcggcgcactgatgatcctcgatgaagtacaaacgggcatggggcgcacgggcaagatgttcgcctgcgagcatgagaacgtacagccggatatcctctgccttgccaaagcgctcggcggcggcgtgatgccgattggcgcgaccatcgccactgaagaggtgtttagtgttctgttcgacaacccattcctgcataccaccacctttggcggcaacccgctggcctgtgcggcggcgctggcgaccatcaatgtgttgctggagcagaacttaccggctcaggctgagcaaaaaggcgatatgttgctggacggtttccgtcaactggcgcgggaatatcccgatctggtacaggaagcgcgtggtaaagggatgttgatggcgattgagtttgttgataacgaaatcggctataactttgccagcgagatgttccgccagcgcgtactggtggccggaacgctcaataacgccaaaacgatccgcattgaaccgccactgacactgaccattgaacagtgtgaactggtgatcaaagcggcgcgtaaggcgctggcggccatgcgagtaagtgtcgaagaagcgtaatatcaaatcggatggcgatacgacgtcgccatccgatctttttatacgacgcgtacgcccgcaggcatcatccgctccggcgttaacagcacgctttcactgccgtcatcggtttccgcacacaacagcatgcattcgctcgtttcaccacgcattttcgctttttgcagattgcataagaccaccaccgttttccccatcagctcttcttcgctgtagtacggcaccaggctggtcacggtttgcagcgttttttgccccacatcaacctgtacgatgtacagcttgtcggcgttttcatggcgtttcacttccacaatctttccgacgcgcatttccagacgtgcaaaatcagcgtaagccacggtttccattgcttcctcccttagggtaaaattttactaaactatagcaaaagtttttctcaatcctgtaggctaaaaatggagaatgcaggcgtgatcacattcgtgagccgctgtgttaccgttacagcgtcaaagaaacgcgctttatttactgaaaacaggtgacccgataagcacttcctctacaatgggggcgcacatcagggaaagtaaaaaaggtaaacatggcaacactaaaagacatcgcaatcgaagctggcgtatccctggcgacagtatccagggtcttaaatgacgatccgacattgaatgtgaaagaagagacgaaacatcgcattctcgagatcgccgaaaagctggagtacaagaccagtagtgcccgtaaactccagacaggtgcagtcaaccaacaccatattctggctatctacagctaccagcaggagctggagatcaacgatccttactatctggcgatccgccacggcattgaaacccagtgcgaaaagctgggcatcgagctcaccaactgttatgaacacagcggcttaccagacattaaaaacgtcaccggtattttaattgtcggcaaacccacgcccgccctgcgcgccgctgccagcgcgttgaccgacaatatctgttttatcgactttcacgaacccggcagcggttacgatgcggtggatatcgatctggcacgcatcagtaaagaaatcatcgacttctatatcaaccagggcgttaatcgtattggttttattggcggtgaagatgagcctggcaaggcggatattcgtgaggtcgcctttgcggaatatggccgactgaaacaagtggtacgcgaagaggatatctggcgcggcggtttttccagtagcagcggttatgaactggcaaaacaaatgctggcgcgggaagactatccgaaggcactgtttgttgcttccgattccattgctatcggcgtactgcgggcaattcatgaacgaggcctgaacatcccacaggatattagccttatcagcgttaacgatatccccaccgcgcgatttacctttccgccgctctccaccgtgcgcatccattccgagatgatgggaagtcagggcgttaacctggtgtatgaaaaagcccgcgatggtcgcgcgctgccgctgttagtcttcgttcccagcaaattaaaactgcgcggcacgacccgttaaatccccttacacactgtccggcaatcgtttttgccggacagtgctgccgtttattttcgtgatccagttaaagtaaatgcatttacctgctactttttagtaaaaattttactaaactccccagcaattacacaaactaccatcaccatgaatggttccgatttctctctaccgggaggccctatgaatcgctgggaaaacattcagctcacccacgaaaaccgacttgcgccgcgtgcgtacttttttagttatgattctgttgcgcaagcgcgtacctttgcccgcgaaaccagcagcctgtttctgcccttaagcggtcagtggaatttccacttttttgaccatccgctgcaagtaccagaagccttcacctctgagttaatggctgactgggggcatattaccgtccccgccatgtggcaaatggaaggtcacggcaaactgcaatataccgacgaaggttttccgttccccatcgatgtgccgtttgtccccagcgataacccaaccggtgcctatcaacgtattttcaccctcagcgacggctggcagggtaaacagacgctgattaaatttgacggcgtcgaaacctattttgaagtctatgttaacggtcagtatgtgggtttcagcaagggcagtcgcctgaccgcagagtttgacatcagcgcgatggttaaaaccggcgacaacctgttgtgtgtgcgcgtgatgcagtgggcggactctacctacgtggaagaccaggatatgtggtggagtgcggggatcttccgcgatgtttatctggtcggaaaacacctaacgcatattaacgatttcactgtgcgtaccgactttgacgaagcctattgcgatgccacgctttcctgcgaagtggtgctggaaaatctcgccgcctcccctgtcgtcacgacgctggaatataccctgtttgatggcgaacgcgtggtgcacagcagcgccattgatcatttggcaattgaaaaactgaccagcgccagctttgcttttactgtcgaacagccgcagcaatggagtgcagaatccccttatctttaccatctggtcatgacgctgaaagacgccaacggcaacgttctggaagtggtgccacaacgcgttggcttccgtgatatcaaagtgcgcgacggtctgttctggatcaataaccgttatgtgatgctgcacggcgtcaaccgtcacgacaacgatcatcgcaaaggccgcgccgttggaatggatcgcgtcgagaaagatctccagttgatgaagcagcacaatatcaactccgtgcgtaccgctcactacccgaacgatccgcgtttttacgaactgtgtgatatctacggcctgtttgtgatggcggaaaccgacgtcgaaagccacggctttgctaatgtcggcgatattagccgtattaccgacgatccgcagtgggaaaaagtctacgtcgagcgcattgttcgccatatccacgcgcagaaaaaccatccgagcatcatcatctggagcctgggcaatgaatccggctatggctgtaacatccgcgcgatgtaccatgcggcgaaagcgctggatgacacgcgactggtgcattacgaagaagatcgcgatgctgaagtggtcgatattatttccaccatgtacacccgcgtgccgctgatgaatgagtttggtgaatacccgcatccgaagccgcgcatcatctgtgaatatgctcatgcgatggggaacggaccgggcgggctgacggagtaccagaacgtcttctataagcacgattgcattcagggtcattatgtctgggagtggtgcgaccacgggatccaggcacaggacgaccacggcaatgtctggtataaattcggcggcgactacggcgactatcccaacaactataacttctgtcttgatggtttgatctattccgatcagacgccgggaccgggcctgaaagagtacaaacaggttatcgcgccggtaaaaatccacgcgcgggatctgactcgcggcgagttgaaagtcgaaaataaactgtggtttaccacgcttgatgactacaccctgcacgcagaggtgcgcgccgaaggtgaaacgctcgcgacgcagcagattaaactgcgcgacgttgcgccgaacagcgaagcccccttgcagatcacgctgccgcagctggacgcccgcgaagcgttcctcaacattacggtgaccaaagattcccgcacccgctacagcgaagccggacaccctatcgccacttatcagttcccgctgaaggaaaacaccgcgcagccagtgcctttcgcaccaaataatgcgcgtccgctgacgctggaagacgatcgtttgagctgcaccgttcgcggctacaacttcgcgatcaccttcagtaaaatgagtggcaaaccgacatcctggcaggtgaatggcgaaagcctgctgactcgcgagccaaagatcaacttcttcaagccgatgatcgacaaccacaagcaggagtacgaagggctgtggcaaccgaatcatttgcagatcatgcaggaacatctgcgcgactttgccgtagaacagagcgatggtgaagtgctgatcatcagccgcacagttattgccccgccggtgtttgacttcgggatgcgctgcacctacatctggcgcatcgctgccgatggccaggttaacgtggcgctttccggcgagcgttacggcgactatccgcacatcattccgtgcatcggtttcaccatgggaattaacggcgaatacgatcaggtggcgtattacggtcgtggaccgggcgaaaactacgccgacagccagcaggctaacatcatcgatatctggcgcagcaccgtcgatgccatgttcgagaactatcccttcccgcagaacaacggtaaccgtcagcatgtccgctggacggcactgactaaccgccacggtaacggtctgctggtggttccgcagcgcccaattaacttcagcgcctggcactatacccaggaaaacatccacgctgcccagcactgtaacgagctgcagcgcagtgatgacatcaccctgaacctcgatcaccagctgcttggcctcggctccaactcctggggcagcgaggtgctggactcctggcgcgtctggttccgtgacttcagctacggctttacgttgctgccggtttctggcggagaagctaccgcgcaaagcctggcgagctatgagttcggcgcagggttcttttccacgaatttgcacagcgagaataagcaatgaggatcatcgataacttagaacagttccgccagatttacgcctctggcaagaagtggcaacgctgcgttgaagcgattgaaaatatcgacaacattcagcctggcgtcgcccactccatcggtgacagtttgacttaccgcgtggagacagactccgcgaccgatgcgctatttaccgggcatcgacgctattttgaagtgcattactacctgcaagggcagcaaaaaattgaatatgcgccgaaagagacattacaggtagtggaatattatcgtgatgaaactgaccgtgaatatttaaaaggctgcggagaaaccgttgaggtccacgaagggcaaatcgttatttgcgatatccatgaagcgtatcggtttatctgcaataacgcggtcaaaaaagtggttctcaaagtcaccatcgaagatggttatttccataacaaataacaactacggcggcaaaaggagtttgccgccaccgctaccctactcattttcggagatgtgttatgtctgataccaaacgtaatacaatcggcaaattcggcttgctcagcctgacttttgccgccgtttacagctttaacaacgttatcaataataatattgagcttggactggccagcgcaccgatgtttttcctcgcgacgattttttattttattcccttctgtctgatcatcgcagaatttgttagcttaaataaaaacagtgaagccggtgtctacgcgtgggtaaaaagtagcctgggcggacgttgggcatttattactgcctatacctactggttcgtaaacctgttctttttcaccagtctgttgccgcgcgttattgcttatgctagctatgccttcctcggatacgaatatattatgacgccggttgccaccaccattatcagtatggtgctgttcgccttctccacctgggtttccaccaacggggcgaaaatgttggggccaattacctccgtcactagtacgctgatgctgctgttaacgctctcctacattttactggcaggtacggcgctggttggcggcgtacagcctgctgacgccatcaccgttgacgcgatgatcccgaacttcaactgggcgttcctcggcgttaccacctggatctttatggccgcaggtggcgcggagtccgtcgctgtgtacgttaacgacgtcaaaggcggtagcaaaagcttcgttaaagtgatcatcctcgccgggatttttatcggcgtactgtattccgtctccagcgtgctgattaacgtcttcgtcagcagcaaagagttgaaatttaccggcggaagcgtgcaggtattccacggcatggcggcgtattttggtctaccggaagcgttgatgaatcgctttgtcggtctggtgtcctttaccgcgatgttcggttccctgctgatgtggaccgcaacgccggtgaaaattttcttctccgaaatcccggaaggcatctttggtaagaaaaccgtcgaactgaacgaaaacggcgttccggcgcgcgcagcgtggatccagttcctgatcgtcatcccgctgatgattatcccgatgctcggttccaataccgtgcaggatctgatgaatactattattaatatgaccgccgcagcgtccatgcttccgccgttattcatcatgctggcttacctgaatttacgcgccaaattagatcacctgccacgcgatttccgtatgggctcccgccgcaccggtattatcgttgttagtatgctgattgcgatatttgccgtagggtttgtcgctagcacattcccgactggcgcgaatattctgaccatcattttttataacgtcggcggtattgttatcttccttggctttgcgtggtggaaatacagtaaatatataaagggattaacggctgaagagcgccatattgaagcgacgccagccagcaatgttgattaagcagaataataaaaaatgagcaggcattttccctcttcctggatgaggagagggaaaatagtttctgcctttatatttttataattacaacgataaaaggctgtactttttctttagctcatggattaacacaatgaaattaatcactgcaccatgcagagcattacttgctctgccgttttgctacgccttttctgcggcaggagaagaagcacgtccggcagaacatgacgacacaaaaacacccgcaattaccagcacatcttctcctagttttcgtttttacggcgaattaggggttggtggatatatggatttagagggtgagaataaacataaatacagcgacggtacctatattgaaggtggcctggagatgaagtacggctcctggttcggcctgatttacggcgaaggctggaccgtgcaggccgaccacgacggcaatgcctgggtgccagaccatagctggggtggtttcgagggcggaattaaccgtttctatggcggttatcgtaccaatgatggcaccgaaatcatgctcagtctgcgtcaggattccagcctggatgacctgcaatggtggggcgatttcacccccgatctgggctacgtcattcccaatacccgcgacattatgactgcgctgaaggtacagaacttaagcggcaactttcgttatagcgtcaccgcgactcctgccggacatcatgatgaaagcaaagcctggctacattttggcaaatacgatcgctatgacgacaaatacacctatccggcaatgatgaacggttacatccagtatgaccttgccgaaggcatcacctggatgaacggtctggaaatcaccgacggcacaggacagctctatctcacgggcctgctaactcctaactttgccgctcgcgcctggcaccataccggacgcgccgacgggctggacgtaccgggaagtgaaagtgggatgatggtgagcgccatgtatgaagcgttaaagggcgtttatctctccaccgcttacacctacgccaaacatcgccctgaccacgctgacgatgaaaccacctctttcatgcagtttggtatctggtacgaatacggcggcggacgtttcgccacggcttttgatagccgcttctacatgaaaaatgcctctcacgatcccagcgaccaaatcttcctgatgcaatatttctactggtaataaggactgtaatttcatgaaaataaaaactattttaacgccagtaacctgcgctctgctgataagtttttccgcccatgccgctaacgccgacaattataaaaacgtgattaaccgtactggcgcgccgcagtacatgaaggattacgattacgacgatcaccagcgttttaatccgtttttcgatctcggagcctggcatggtcatctgttgccagacggccctaacaccatgggcggctttccgggcgttgcgctgctgacggaagagtacatcaactttatggccagcaatttcgaccgcctgaccgtctggcaggacggcaagaaagtcgactttacgctggaggcatacagtattcccggtgcgctggtgcaaaaactgacagcaaaagatgtgcaagtcgaaatgactctgcgcttcgccacgccgcgcacgagtctactggaaaccaaaatcaccagcaataaaccgctggatctggtgtgggacggcgaactgctggaaaaactggaagcgaaagaagggaaaccgctttccgataaaaccattgctggcgaataccctgactatcagcgcaaaatcagcgccacccgtgatggcctgaaagtcacctttggcaaagtgcgcgccacctgggatctgctgacctccggcgaaagcgaatatcaggtgcataaatccctgccggtgcagactgaaatcaacggtaatcgctttaccagtaaggcgcatatcaacggtagcaccacgctctacaccacctattcccatctgctgaccgctcaggaagttagcaaagagcaaatgcagatccgcgatattctggcgcgtccggcgttttatctcaccgccagccagcaacgctgggaagaatacctgaagaaagggttaaccaatccggatgcgacgccggaacagacgcgcgtcgcggtgaaagcgatcgaaacgctcaacggtaactggcgcagtccgggcggtgcggtgaaatttaacaccgttacaccgagcgtgaccgggcgctggttctccggcaatcagacctggccgtgggatacctggaagcaggcgtttgcgatggcgcatttcaatccggacatcgccaaagagaatatccgcgcggtcttctcctggcagatccagcctggcgatagcgtgcgtccgcaggatgtgggctttgtccccgacctgatagcgtggaaccttagccccgagcgtggtggcgatggcggcaactggaacgaacgtaataccaaacccagccttgccgcctggagcgtgatggaagtgtataacgtcacccaagataaaacctgggtggcagagatgtacccgaaactggtggcctatcacgactggtggttacgtaaccgcgatcacaacggcaacggcgtgccggaatatggcgcgacccgcgacaaagcccacaacactgagagcggcgagatgctgtttacggtgaaaaaaggcgataaagaagagacgcagtctgggctgaacaactacgcccgcgtggtggagaaaggccagtacgacagtctggaaattccggcacaggttgctgcaagctgggaaagcgggcgtgatgatgccgccgtctttgggtttatcgacaaagaacagttggataaatatgtcgctaatggcggcaaacgtagcgactggacggtgaaattcgccgaaaaccgcagtcaggacggaacgttgctgggctacagcctattgcaggagagcgtggatcaggccagctatatgtacagcgataaccattatctggcggagatggcaaccatcctcggtaagccagaagaggccaaacgctatcgccagttggcacagcagctcgcggactacatcaacacctgtatgttcgacccgactacccagttctactatgacgtacgtattgaagataaaccactggcgaacggctgcgcgggcaaaccgattgttgagcgcggtaaagggccggaaggctggagcccgctgtttaacggtgcggcaacgcaggccaatgccgacgcggtggtgaaggtgatgctcgatcctaaagagttcaacacctttgtcccgctgggaacggcggcgttaaccaatccggcttttggcgctgatatctactggcgtgggcgcgtatgggtggatcagttctggtttggtctgaaagggatggagcgttacggttatcgtgatgatgccctgaagctggcggatacgttcttccggcacgccaaagggttaaccgccgatggaccaattcaggaaaattacaacccgctgacaggcgcacagcaaggcgcaccaaatttctcctggagtgccgcgcatttgtatatgttgtataacgattttttccgtaagcaataatttgcaactgctggcggatgcggcgtaaacgccttatccgccctacatgtgcaatcctcctggccggataaaacgcggcaagcgttgcatccggcaactgcaccgcgccactggcggatgcggcgtgaacgccttatccgccctacatgtgtgttcccgtaggtcggataagacgcgacaagcgtcgcatccggcatctgcaccgcgccactggcggatgcggcgtggacgccttatccgccctacatgtgcaattccgtaacctggataaaacgcgacaagcgtcgcatccggcgttatcaccgggcgtattctttttgaatcccatcacaaaccccgcactccccttttcccttttctccggcgacggctaaattagaactcatccgaccacataacaattattttacatactggacaattttatgagctacccgagcctgttcgccccgctggatttaggttttaccacgttaaaaaaccgcgtgttgatgggcagtatgcacaccgggctggaggaatacccggacggtgccgagcggctggcagcgttttatgccgaacgcgcccgtcacggcgtggcgctgattgtcagcggcggcattgcaccagatttaacaggcgttggcatggaaggtggcgcaatgctcaacgacgccagccagatcccacaccatcgcaccattaccgaagcggtacatcaggaaggcggcaaaatagccctgcaaattttgcataccgggcgctacagctaccaaccgcatctggtcgccccgtccgcattgcaggcccccatcaaccgtttcgtgccccatgagttaagccatgaagagatcctgcaactgatcgacaatttcgcccgctgcgcgcaactggcgcgggaggcaggatacgacggtgtagaggtgatgggttccgaagggtatttgatcaacgaatttctgacgctgcgcaccaatcagcgtagtgaccagtggggcggcgattaccgcaaccggatgcgatttgccgtagaagtagtgcgtgcggtgcgcgaacgcgtcggcaacgacttcattattatctaccgactgagcatgctcgacctggtcgaagacggcgggacttttgccgaaacggtagagctggcgcaggccattgaagcggcgggcgcgaccattatcaacaccggcattggctggcatgaagcacgtattccgaccattgccacgcccgtgccgcgcggcgcatttagctgggtcacgcgcaaactgaaaggccacgtcagcctgccgctggtaaccaccaaccggattaacgatccgcaggttgccgacgatattctcagccgcggcgatgccgatatggtaagcatggcgcgaccgtttcttgctgatgcggagctgctgagtaaagcgcaaagcggacgagccgatgagatcaacacttgtattggctgcaatcaggcctgtctcgatcaaatcttcgttggcaaagtcaccagctgcctggtgaatcctcgcgcctgccacgaaaccaaaatgccaatccttcccgccgtgcagaaaaaaaatctggcggtggtcggtgcgggacctgctgggctggcgtttgccattaacgcggcggcgcgtgggcatcaggtaacattgtttgacgctcatagcgagattggcgggcagtttaatatcgccaaacagatccccggcaaagaggagttttacgaaacgctgcgctattaccgccggatgatcgaagtgacgggcgtgacgctaaaactcaatcacaccgtgacggcggatcagttacaggctttcgatgaaacgatcctcgccagtgggatcgtgccgcgcactccgcccatcgacgggatcgatcatccgaaggtattgagttatctcgatgtactgcgcgacaaagcgccggttggcaacaaagttgccatcatcggttgtggcgggattggttttgatacggcgatgtatttaagtcagccgggcgaatccaccagccagaatatcgccgggttctgtaatgaatgggggatcgacagtagcctacaacaggctggtggcttaagcccgcagggaatgcagatcccccgtagcccacggcagattgtgatgctccagcgcaaagccagcaaaccaggacaggggttaggcaaaaccaccggctggatccatcgcaccaccctgctcagccggggtgtgaaaatgatcccaggcgtaagttatcagaagattgacgatgacgggctgcatgtggtgatcaacggcgaaacgcaggtattagcagtggacaatgtggtgatctgcgcagggcaagagccaaaccgcgcgctggcgcaaccgctgattgatagcgggaaaacggtgcatttaattggcggctgcgatgtggctatggagctggacgcacgacgggcaattgcccagggaacacggctggcgctggagatttaaatcgttatttgaagcgccggatgcaacgcatccggcacgtcgcgttaatcaataaacaaggcgggagaaatgccgaatcgcgttgccaattttttagcgtgttccagcgttaatttcctcttcccgctcaaaacgcgactcaccatagatttactgccaatttccggcagatcggaaagggttaaaccatattgatccataagggtacgaatcacggctataccgccaggcatggcttgagccatggcattaaattccgcaaattcgggcgcactttcttcccacgcggttattttggcacacaccagatccagcaaggggttttcaggatcgttgagcagcagatgatctaccagttccagcgcctgggtgtattgttcctcgttctgaatacccgccagaaaaggtgccacagcagttagcttttctcctgcttgcaagatgtcggcaatcgcaatcattttttccccttagtacgatgaacagcggtaaagaaatcgtattctttatgcgtcataacttcacgtatgtagcacttttggctttcaaaaaagaccattgctacaacacgtaattcattgcccccaacattgaaaacataatgcttatccagatatttgaagttatccagagatgggaatactgcttttaaactctcaggttttttgaaatatcccttagcaatcgtgttccccagagccaccaactccgttttatgttgcgggtatttttccgcagcatctttcaatgctttttgagttatcaggtgcattcttcatcacgtccgttgacaaattggcaatatgataacatccgttgccagattggcaacggatgaatttatctgtgtgacggaagaataaacgtagaaaaacgctaaacaagagaatgtagacgatggtgacagggattttttgttttatggaagcgcgattccagaactgggcagacattgccggatgcgacgcttgccgcgtcttatccggcctggagtaacgtgctgaacgtaggccggataaggcgtttacgccgcatccggcaggtaactcccaatcttaccgacgacgtcccagcttcaccgctttcagtaccacaaatttattattcgtcgcaatagtggtgcagttgccgaaaatcttcttcagtttatggaagtaatccaggtgacggttggcaacgatatacagctcgccgttgattttcaggcagcggcgggcgtggtggaacatctcccaggcgacgttatcggtcagcgcatgttgttggtgaaacggcgggttgcagagcacagcattaaagcggaaaggctccacgccggagagcgcgttgttgatcataaactcgcagcgatccaacgcctctggcatgttggtttcaacgttcaaacggctggaagcaaccgccatcgggctttcatcgacaaacaccactttcgcctgcgggtttttatcaagcagcgtcagaccaataacgccattaccgcaaccgagatcgacaatctccccttcgagattctctggcagatgttgcataaagaagcgcgcgccgatatcaagcccggtgcgggagaagacattcgcatggttgtggatagtccagtcagtaccttccagcttccagctaacggtctgcggcgcatcggccagctgcggttcattgaaagtgcaattaatcaggcgcgcttttttccatgccagcgtggtggtggttgggccgagcactttttcgaacagttccagcgtggaagtgtgaatgtcacgggccttggcaccggcaataatacgtgtatcgctcgtgaccactttgcgcagcgcacgcagttgctgttccagcaatgccagtgttttcggcactttgatcagcaccacacccggctgttgcgggtagtcggcggtgctgtcgagaaacttcacgctgctctcatcaatcccgttgaggcgtaaattctcgcgcgtcgccagttcactgatgtaactgtcgccaatgctgtacggcttatgttccgccagtgcgcagcttaacgcaccaaaggcatcattcaggatcaacaccgggccgcggatttctgtgtcgtccaactgttgcagcaaatattcatccgccgcttcccacgcctgtagcgggttaacgtcatccgtcgccggaaaacgttgtagtgtcagactacggaaaccgttgtctaagtggctcatcggccctcctgaatgataaaatttcgacattgcccctgaaaagggtgcgtgagtataccctttttctctttttcgtgggcggttatgagcaatcttacttatcttcagggttatcccgagcagctactttcccaggtgcgaacactgattaacgaacagcgtctgggcgatgtgctggcaaaacgctatccgggaacacacgactacgccaccgataaagccctctggcaatatactcaggatctgaaaaatcagtttctgcgtaatgccccgccgatcaataaagtgatgtatgacaataagatccatgtgctaaaaaacgcgctcgggttacataccgctgtttctcgtgtgcagggcggcaagctgaaagcaaaggtggagatccgcgtcgctaccgtgtttcgcaacgcgccggaaccgtttttgcgcatgatcgtggtgcacgagctggcgcacctgaaggagaaagagcataacaaagcgttttaccagttgtgttgtcatatggaaccccagtaccaccagcttgagttcgacacccgactgtggctaacgcagttgagccttgggcagaacaaaatctgaaaatgatgtcaggcgttatcttttctttctttagcgcctaaaatcgacctcccccctttcgttaaggataacgaccatgctgcgcgcatttgcccgccttcttctccgtatttgtttttctcgccggactctaaagattgcctgcttactgttacttgtggcaggagcgaccatccttatcgccgatcgcgtaatggtcaacgccagcaaacagctgacctggagcgatgtcaacgccgttccggcgcgtaacgtgggtttattgctgggggcgaggccgggtaatcgctactttacccgacgtattgataccgcagcagcgttgtaccacgccggaaaagtgaaatggctgctggtaagtggcgataacggacgtaaaaattacgatgaagcaagtggtatgcagcaggctttgatcgctaaaggcgtaccagcaaaagtgatcttctgcgactatgccggattcagtacgctggatagcgtagtgcgtgccaaaaaggtttttggtgaaaaccatatcaccattatcagccaagaatttcataatcaacgcgccatctggctggcaaaacagtacggcatcgacgctatcggttttaacgcgccagacctcaatatgaagcacggtttttatactcaactgcgggagaaactcgctcgtgtcagcgccgtgattgacgccaaaatcctccatcgccagccgaaatatctcgggcctagcgtcatgattgggccgtttagtgagcatggctgtccggcgcagaaataatgcgtatctgcgcacgtcgaagatgaaaaaggcgtgctacattgacgacagaatccctttatggagtatccacgcgttatgatacgtttcgctgtgattggtacgaactggatcactcgccagttcgtcgaggccgcccatgagagcggtaaatacaagttaaccgccgtatattcccgcagccttgaacaggcccagcacttcgccaatgatttttctgtcgagcatctgtttaccagcctggaagcgatggcggaaagcgatgccattgacgcggtgtatattgccagcccgaattccctgcatttttcccagacacaacttttccttagccataaaattaatgtgatttgcgagaaaccgctggcgagcaatctggcggaagtggatgccgccattgcctgtgcgcgggaaaatcaggtggtgctgtttgaggcatttaaaaccgcctgcctgccgaactttcatttgttgcgccaggcgctgccgaaagtcggcaaactgcggaaagtctttttcaactattgccagtattccagccggtatcaacgttacctggatggtgagaatcccaacacctttaatccggcattctctaacggtagtattatggatatcggtttttactgtctggcgagcgcggtggcgttatttggtgagccgaaaagcgtgcaggcaaccgccagtttgctggcaagcggcgttgacgcccagggcgtggtggtgatggattacggtgatttcagcgtcaccttgcagcacagtaaagtcagtgattctgtcctggcgagcgagattcagggcgaagcaggaagcctggtgattgaaaaactgtctgaatgccagaaagtgtgcttcgtgccgcgtggcagccaaatgcaggatctcacccagccgcagcatattaataccatgctctacgaagcagagctgttcgctaccctggtggatgagcatctggtggatcatccagggctggcggtcagtcgcatcaccgccaaactgctgaccgagatccgccgccagactggggtgatttttccggcagatagcgtaaaactataattgccaaagtaaaacagtgtaaaaggtatgtaacagaccattgactggctgaatggtctgtcatactttgttacctgcaaaggggagtaacttcattgccggtcgatcgtcattacgatgtgtgaaaaaacacatccggtcaccgggcaacccgaaaggaatacgcagacgtattccttttttgttgtaagtgagaccttgccggaaggcgaggtctatgcataaaaagcagcggctgacgtcttccgacgttggccgtttttttatgtgtaaggaacttctatgaatactgtcggcacgccgttgctatggggcggattcgctgttgttgtcgccattatgctggctatcgacctgttgttgcaggggcgtcgtggggcacatgccatgaccatgaaacaggctgcggcctggagcctggtctgggtgacgctgagcttactgtttaacgccgctttctggtggtatctggtgcaaaccgaaggtcgcgccgttgccgatccacaggcactggcctttctcacaggttatctgattgagaaaagcctggcggtcgataacgtctttgtctggctgatgttgttcagctatttctctgttccggcggcattacaacgccgcgtgctggtgtatggcgtgctcggggcgattgttctgcgtaccatcatgatcttcactggcagctggctaattagccagttcgactggatcctgtatatcttcggtgccttcctgctgtttaccggcgtgaagatggcgctcgcccatgaagatgaaagtggcattggcgacaagccgctggtgcgctggctacgcggtcatttgcgcatgaccgacaccatcgacaacgagcatttctttgtgcgtaagaatggattgctgtacgccacaccgctgatgctggtactgattctggtggaattgagcgacgtgattttcgccgtggatagcattccggctatcttcgccgtgaccactgacccgttcattgtgctgaccagtaacctgtttgcgatcctcggcctgcgtgcgatgtatttcctgctggcgggcgtagcagagcgtttcagcatgctcaaatatggcctggcggtgattctggtgtttatcggtatcaagatgctgattgtcgacttctaccatattccaatcgccgtcagcctgggcgtggtgtttggcattctggtgatgacgtttattatcaacgcctgggtgaattatcggcatgataagcagcggggtggataatttttaatctgcctaagccgtgtaccctgtcattaacatgagcaccgttttctccctctcccttccagggagagggtcggggtgagggtaatttttcgcaccgatgctggcctgttcccctcaccctaaccctctccccaaacggggcgaggggactgaccgagtccttttttgatgttgtcatcagtctggaagccgcacgttggctttatttttatgtcaaagaaatgtaaccattaagtttcaaaatatgacctctctttaaaatccagcatttttcgcttcccgaagctgtaactttccttatactcgaccttgcaaacactttgttacatcctgaaagatgcgtcgacagaacgcaccagggatgtgcgacaacacaatgaaaggatcgaaaaatgactacgcaacgtagtccggggctattccggcgtctggctcatggcagcctggtaaaacaaatcctggtcggccttgttctggggattcttctggcatggatcagtaaacccgcggcggaagctgttggtctgttaggtactttgttcgtcggcgcactgaaagccgttgcccccatcctggtgttgatgctggtgatggcatctattgctaaccaccagcacgggcagaaaaccaatatccgccctattttgttcctctatctactgggcaccttctctgctgctctggccgcagtagtcttcagctttgccttcccttctaccctgcatttatccagtagcgcgggtgatattagcccgccgagtggcattgtcgaagtgatgcgcgggctggtaatgagcatggtttccaaccccatcgacgcgctgctgaaaggtaactacatcgggattctggtgtgggcgatcggcctcggcttcgcactgcgtcacggtaacgagaccaccaaaaacctggttaacgatatgagcaatgccgttacctttatggtgaaactggtcattcgcttcgcaccgattggtatttttgggctggtttcttctaccctggcaaccaccggtttctccacactgtggggctacgcgcaactgctggtcgtgctggttggctgtatgttactggtggcgctggtggttaacccattgctggtgtggtggaaaattcgtcgtaacccgttcccgctggtgctgctgtgcctgcgcgaaagcggtgtgtatgccttcttcacccgcagctctgcagcgaacattccggtgaatatggcgctgtgtgaaaagctgaatctggatcgcgatacctattccgtttctattccgctgggagccaccatcaatatggcgggcgcagcaatcactattaccgtgttgacgctggctgcggttaatacgctgggtattccggtcgatctgcccacggcgctgctgttgagcgtggtggcttctctgtgtgcctgtggcgcatccggcgtggcgggggggtctctgctgctgatcccactggcctgtaatatgttcggtattagcaacgatatcgccatgcaggtggttgccgtcggctttatcatcggcgtattgcaggactcttgcgaaaccgcgctgaactctagtactgacgtgctgttcactgcggcagcttgccaggcagaagacgatcgtctggcaaatagcgccctgcgtaattaattgtttaacccctttcgtctacggcggaaggggttttctcaactttaaacggatcaattccccttttctgcatccgccagaaacgaatgatattcaggccattcataagcagaaaactaccctcaatcatcgtgccgcctatgctccccgcccagaagttgtgaatcacccagcaacacgtactaaaccacattacgcagcgcatggtcagccctttacagcagaatagcgcccaggtactgacaatcgtgccgataaccggcaatagttcgacaggatgatggaacttcgcgaggccaattccgccagtcagcacaataaaaatcgccattacccataagctgcgcgtgcgtaaggtaatcaatgtacgaatggcattaaggatggcactggcaccagcgggataggtgcccagaagaaaaaaatgtacgccaataacggcgctatagacgctaagctgctttttgaagcgacgttcgtcacgattgaaaaatgttgtgataccaatcagaaaggcgatgacacccacgccctgggccagccaatacgcggtcatgataaatccttagcaggtatggaaaagcaaacggcgcttcacattatgaaacgccgttttttattaacaactcatttcgactttatagcgttacgccgcttttgaagatcgccagttcgcggaagtcgttacgctcgttacaggtttgcttaccgttggcaaactcaacgatggtgtcgataaattcttccagcaactgcggcatcgctttaccgtggatcaactgacccgcgtcaaagtcgatccagtgttttttcttcgccgccagttcactgttggtggcgattttcaccgtcggcacaaatccaccatacggcgtgccacgaccagtactgaacagcaccatatggcagcccgcacccgccagggcgctggtcgctacggcatcgttacccggcgcacttaacaagttcagccctggcgttttcagacgctcgccgtaacgcagcacgtcaaccacgacgctggaacccgctttctgggtacagccaagacttttgtcttccagcgtggtgataccgcccgctttgttccccgggcttgggttttcatagatcggctgatcatgggcaataaagtactgtttgaagtcgttgaccatggtgaccagtttttcaaacgttgcttcgtcgcggcaatggtccatcagcaactgctctgcgccaaacatctccggcacttcggtcagtacggtagtaccgccgttagcaatcacgtagtcagagaaacgccccagcatcgggttagcagtaataccagaaagaccgtcagaaccaccgcactccagaccaaacttcagttcgctgagtttgcctggctcgcgtttatcgttgcgcatcacgttatacagctgatgcaaatgctcgattccggcttcgatctcatcatcctgctgttggcagatcatgaaatgaacgcgttcaggatcgatatcgcccagcgtttcacggaatgcggcaacctggttgttttcacagcccagaccaatcaccagcactgcgcctgcgttcgggtggcgcaccatgttttgcagcatggtgcgggtattaatgtgatcgtcgcccagctgactgcagccgtaggtgtggctgaagaggaacacgccgtcagtaccttcggcgttgttggtctctttcagaaaacggttctggatctgccgcgcgatgccgttgacacagcccacggttggcaggatccacagctcattacgcaccccgacatcgccgttagcgcgacgatagatctgcacttcacgatctgccgcttgcgcaggcagatcctgaaaatcaggttgatagcgatactgatccagatcgctcagattcgtgcgcgtattgtgggcgtgaacgtgaacacctgccgcaatatccgccaatgcataaccaatcggcaggccatatttgatgacattggccccttttgcgatatccgttaacgcaaatttatgtccacgagcaacatcctggcgcagcgtaacagtctggttatcgacactgacttctgtgccttcagccaaatctgctaaagcgaccgcgacgttatccagcgcatggatcttgatgtattgcatatcaaccccagaccttagttcagttcaatggcgaagtagtcacgcgcattgttaaagcaaatatttttcaccatctcgcccagcaggttgatgtccgccggtgcttcgcccgcttccacccagcgaccgatcatctggcacagaatgcggcggaagtattcgtgacgggtgtaactcaggaagctacggctgtcagtcagcataccgacaaagcggctcagcagaccgagctgcgccagttgggtcatctgacgttccataccgtctttctgatcgttaaaccaccagccggaaccgaactgcattttgcccggcataccttcgccctggaagttaccgatcatggtgcccagcacttcgttatcgcgcgggttcaggcagtacagaatggttttcggcagcaggttttcttcattctgcttgctcagcaacttagacagctcttccgccatcggacggtcgttgatggagtcaaagcctacatccggccccagcagtttgaactgacgcaggttgttattacgcagcgcgccaatgtggtactgctgtacccagccgcgacgtgcatattcggcaccaaggaacaccagtaccgcagttttgaactgcgccacttcgtgctcgctcagggtttcgccagccagacggcgcgccagaatgctgtccagttccgcttcgttcgcttcagcaaacatcaccacatccagcgcgtggtcagacactttacagccgtgagcggcgaagtgatccagacgtttggtcagggcagtttgcaggtcagcaaagcggcgaatgtcggtatcggaaacttcgcccagcttcgccatgtagtcgttaaaggtcgcctgttcgatgttgaaggctttgtccggacgccagctcggcagcactttgatggtgaaagagccgtctttggcgatctctgcgtgatgctccagagaatcgatcgggtcatcggtggtgccgaccattttcacgttcatctgctgcatgatgccgcgcgcggagaagttatcctgcgccagcagttcgttacattcgttccagatttcatcggcagtactcggagaaagcaatttgccagtgataccaaacggacggcgcagttcgaggtgcgtccagtggtataacgggttgccgatagtgtgcggaacagtcgccgcccaggcgtcaaatttttcacggtcagacgcatcaccggtacacagacgctcggccacaccgttggtacgcatagcgcgccatttgtagtgatcgcctttcagccagatgtcatacaggtttttaaaacgatagtcttccgcaatctgctgcggcggcaaatggcaatggtaatcgaaaatcggctggtcttttgcgtagtcgtgatacagacggcgggcaaattcggtatctaacaggaaatcttcagtcataaacggagtcattttcgtcttcctctcaacgagtgagctagcttgcttatggtgcgatgctgacaaagttatcacaccaatttccagagtccgaagatattttcgtgagttagatcaataaacgtagttaaaaaaattactctcaaagtggtaaatctcgctgcaggccgcgccagtactggccttgctgtcgtcaggtaatgtccctacaaatattcccacatttgtgatggctctcaccttttaaagttgtatgacaagttatctttctgccgtcgcaaatcataagtcgacggaatgcaaattgccgattcattcatttgttagatgaatcgggttaaccggtacggaagccgaattagcacgaaactttcatggcaacgttcggggcgtgccggttttttttcggttacccggtcgtaactaacatcttcagcctctggcgggatgatggccgcgcttcctgcggatataacaaaacgatgaggttttacatgcgtaaaattaaagggttacgttggtatatgatcgcactggtgacgctcggcaccgtgcttggttacctgacgcgtaacactgtggcggcagctgcgccaactctgatggaagagttaaacatctccacccaacagtattcctatatcatcgcagcctattctgctgcttatacggtcatgcaaccggtagcaggttatgtactggatgtgctgggtacgaaaatcggttatgcaatgtttgctgtgctgtgggccgtgttctgtggtgcaaccgcgctggcaggtagctggggtggcctggctgttgctcgtggtgcggtcggtgccgcggaagcagcgatgatcccggcgggtctgaaagccagctccgaatggttcccggcgaaagagcgttccatcgcagtaggctactttaacgtaggttctagcattggtgcgatgattgcgccgccgctggtggtatgggcaatcgtaatgcacagctggcagatggcatttatcatctccggtgcattgagctttatctgggcgatggcatggctgattttctataaacatccgcgcgaccagaagcatctgaccgatgaagaacgcgactatattattaatggtcaggaagcccagcaccaggtgagcacggcgaagaaaatgtccgttggtcagatcctgcgtaaccgtcagttctggggtatcgcgctgccgcgtttcctggcagaaccggcctggggtacttttaacgcgtggatcccgctgttcatgtttaaagtttacggctttaacctgaaagagatcgcgatgttcgcctggatgccgatgctgtttgctgacctcggttgtatcctcggtggttacctgccgccgctgttccagcgttggtttggtgtgaacctgatcgtttcccgtaagatggtcgtaacgctgggtgcagtgctgatgattggcccgggtatgatcggcctgttcaccaacccgtatgtcgcaattatgctgctgtgtatcggtggttttgcccaccaggcactgtctggcgcgctgattacgctctcttccgatgtgtttggtcgtaacgaagtggcaacggcaaacggtttaaccgggatgtccgcatggctggcaagtacgctgtttgcgctggttgtcggtgcactggctgacaccatcggcttcagcccgctgttcgcagttctggcagtgttcgacctgttaggtgcgctggttatctggaccgtgttgcagaacaaaccggcgattgaggtggcgcaggaaacacataacgatcccgcaccgcaacattaacgtttcgtgtaagttttagtttcccttcaaagccgccttctcaggcggctttttcatcactgcgagtagagctaaactcgcaaaagtggtataacaaatatagtctgccgtatcatgcctggagcgcatatggaaatcactgaaccacgccgtttgtatcaacaacttgccgctgacctgaaagagcgcatcgaacagggcgtctatctggtgggtgataaactgcctgcagaacgctttattgccgatgaaaagaacgtcagccgtacggtagttcgtgaagccatcatcatgctggaagttgaaggctatgtcgaagtgcgtaaaggtagtggtattcatgtggtttccaaccagccgcgccatcagcaggcggctgacaataatatggaattcgccaattacggtccgtttgagttgcttcaggctcgccagctcatcgaaagtaatattgccgaattcgcggcaactcaggtaacgaaacaggacatcatgaaactgatggccattcaggaacaggcgcgcggcgaacaatgcttccgtgattccgagtgggatttgcagttccacattcaggtcgctctggcgacgcagaactccgccctggcggctatcgtggaaaaaatgtggacccagcgtagtcataacccgtactggaaaaaactgcacgaacacattgattcccgtaccgtcgataactggtgtgatgaccacgatcaaatcctcaaggcgctgattcgcaaagatcctcatgctgctaagctggcaatgtggcagcatctggaaaacaccaagatcatgttatttaacgaaaccagcgacgacttcgagttcaatgccgaccgctatctattcgccgaaaacccggtggtgcatctcgatacagccaccagcggcagtaaatgaaattcctgtccgacaggcgctgcaatgcgcctgtttgtctcgtcggtaagcgaaaagtataaagtgtcagcctgtgtaaatcctctcgccaccctcccctgcattcagcaaaatcagactccacggacatgtaattttgataacgaacaacgttgacctttgttacaattagattcaatttgaatttatgtttttgaatgctttcttatctcacgatttaacagggaatagttcaggctgtgttgatgtatcaaacccgcagaacataccaaaacagcaataacattgcggtagtgcatcttttaaaaccagcgtggcgttaaccgattcaccaggaataatgaatggaacttttgacccaattgctgcaagccctgtgggcgcaggattttgaaaccctggccaatccaagcatgattggcatgttgtattttgtcttgtttgtaattttgttccttgaaaacggcttgcttccggcggcctttttaccgggcgacagtttactggtattggtcggcgtgttgattgcgaaaggcgcgatgggctatccgcaaacgattctgctgctgaccgttgccgccagcctcggctgctgggtcagctatattcaggggcgatggctgggcaatacccgcaccgtacaaaactggctatctcatttacccgcgcattatcatcaacgcgcacaccatctttttcataaacacggtttaagcgcgctgttaattggtcgctttattgcgtttgtcagaacactgctgccgacgattgccgggttaagtgggctgaataacgcgcgctttcagtttttcaactggatgagcggtctgctgtgggtattgatcctgacaactctgggttacatgctcggcaaaacgccggtatttttaaagtacgaggaccagctgatgagttgcctgatgctgctcccggtggtgctgctggtgtttggcctggcaggttctctggtcgtgttatggaaaaagaaatatggaaatcgggggtaagggatgcaaatacctcgcatgagccttcgccagctagcctggtccggcgctgttttacttctggtcggcacgctgttgctggcctggtccgcggttcgccagcaagagtctacgctggcgattcgtgccgttcatcaaggcacaacgatgccagacggttttagtatctggcatcaccttgacgctcatggcattcctttcaaaagtatcacccccaaaaacgacactctgttaattacatttgactccagcgaccagagcgccgccgcaaaagcggtcctcgacagaacattgccccatggctacatcattgcgcagcaggacaataacagtcaggctatgcagtggctgacccggttacgggataactctcatcgcttcggataacttcctgttatccgaaacatatcactcactttggtgatttcaccgtaactgtctatgattaatgaggcggtggttaacactaccgcttcgttgtctggacaatcgttcctttgtaataggtccgaatcacaatggaaggttcaagaatgaaataccgcatcgctttagctgtttctctctttgctcttagtgccggtagttatgccactaccctgtgtcaggaaaaggagcaaaatatccttaaggagatcagctatgccgaaaaacaccaaaaccagaatcgtattgacggtctgaataaagccctgagtgaagtccgggccaactgtagtgatagccagctgcgtgccgatcatcagaagaaaatcgcaaagcagaaagatgaggtggcggaacgccagcaagatttagccgaggcgaagcaaaaaggcgatgccgataagattgccaaacgcgaacggaaactggcagaagcgcaggaagagctgaaaaagctggaagcgcgcgactactaactcacaatagtcactacttactcacctggagaaaactatgagcaaagaacacactacggaacatctgcgtgctgagttgaaatccctttccgatacgctggaagaggtgcttagcagttctggcgagaagagcaaagaagagttgagtaagattcgtagcaaagcggagcaggcactgaaacagagccgttatcgcctgggtgaaaccggtgatgccattgccaaacaaacccgtgtcgcggcggcgcgtgccgatgagtatgtgcgcgaaaatccgtggacgggcgtgggcattggcgctgcaatcggtgtagtgctcggcgttctgctgagccgtcgttaattatggcggacactcatcacgcacaagggcccggtaaaagcgttctgggcatcgggcagcgaattgtttctatcatggttgaaatggtagagacacgtctgcggctggcggtggtggagctggaagaggaaaaagcgaatctctttcaacttttactgatgctgggcctgacgatgcttttcgctgcatttggtcttatgagcctgatggtgctaattatttgggcggttgacccgcaatatcgcctgaatgcgatgattgccaccaccgtggtgttgctgctactggcactgattggcggtatctggacgctacgtaaaagccgtaagtctacgttgctgcgccatacacgccatgagttagcaaacgatcggcagctgctcgaggaggagtcccgtgagcagtaaagtcgaacgtgaacgacgtaaggcgcaactgcttagccagatccagcaacaacggctggatctttccgccagtcgtcgtgaatggctggagacaacaggcgcttacgatcgtcgctggaatatgctgctaagtctgcgctcctgggcgctggttggcagtagcgtgatggcgatctggacgattcgccatcctaatatgctggtccgctgggccagacgcggttttggcgtatggagcgcctggcgtctggttaaaacgaccctcaagcagcaacagcttcgcggttaacttccctctggccggagccattccggccttatccctcaaattttttgaagatttttgacagttttccttgctaacaatcatcattcaccacgtttatgattctctccatcgacagcaacgacgctaataccgcgccattgcacaaaaaaacaatcagcagcctgagtggcgcagtggagagtatgatgaaaaaattagaagatgttggtgtactggtagcgcgcattttaatgccgattctgtttattaccgctggctggggaaaaattactggctacgcgggtacccaacaatatatggaagcaatgggcgtcccgggttttatgctgccactggtgattctgcttgagtttggtggtggtctggcaatcctgttcggtttcctgactcgcaccacagccctgtttactgcgggctttacgctgctgacggcatttttatttcacagcaactttgctgaaggcgtcaacagcctgatgttcatgaaaaacctgacaatttctggcggattcctgctgctggcaattaccggtccgggcgcgtatagcatcgaccgcctgctgaataaaaagtggtaagcacgcgctatacttaacgataaaaaacgaggaggaagctcctcgtttttgctattggaggagagaaaaatgggtcaactgattgacggcgtctggcatgacacctggtacgataccaaatctaccggcggtaaatttcaacgtagtgcttccgcatttcgtaactggctcactgccgatggcgctcctggccccactggcacaggcggttttatcgcagagaaagatcgttatcatctctatgttagtctcgcctgcccgtgggcgcaccgcacgctgatcatgcgcaaactcaaaggactggaaccgtttatttccgtttccgtagtgaacccgctgatgctggaaaacggttggacctttgatgacagttttccgggagcaaccggagacacgctctatcaaaatgaatttctgtatcagctttatctccacgccgatccacactacagcggacgagttactgttcccgtgctgtgggacaaaaagaaccacaccatcgtcagcaacgaaagtgcagaaatcatccgcatgttcaataccgcgtttgatgcgctgggcgcgaaagcgggtgattactaccctccagccctgcaaacaaaaattgacgaacttaacggctggatttatgacaccgttaacaacggcgtgtataaagctggttttgccaccagccaggaagcttacgacgaggcggtggcgaaagtgtttgaaagcctggcacgactggagcagattttaggccagcatcgttacctgaccggcaaccagctaaccgaagccgatattcgcctgtggactacgctggtgcgttttgatccggtgtatgtgacccacttcaagtgtgataagcaccgcatcagcgattacctgaatctgtacggttttctgcgcgatatctaccagatgccggggatcgccgaaacagtcaatttcgatcatatccgtaatcattacttccgcagccataagaccatcaaccctacggggattattagtattggtccgtggcaggatctcgatgaaccgcatggacgagatgttcgcttcggttaaaaaaaggcaccttacgaggtgcctctgataattagctaagtgcatgttgttcatgtcggatgtggcatgaacgccttatctgacatacaaaacattgtacattcaatagattgcataacccgcgcagaccagataagcgtagcgcatctggcgattttgcgcttgtcatcagtcttagcgcgccttcacggcactttattaattccttgaacgaatatttactgccatttcattcacgtctattcttaatttgctgctttaaaaacaagtgattgagcaaaattgaggcaaaaatggactggtatctgaaagtactaaaaaattatgtcggtttccggggtcgtgcgcggcgcaaagagtactggatgtttattctggtcaacatcatctttacgttcgtgctggggctgctggataaaatgttaggctggcaacgcgctggtggcgaaggcatcctgacgacaatctacggtattctggtgtttttaccgtggtgggcggttcagttccgccgcctgcacgacaccgaccgcagcgcgtggtgggcactgctattcttaatcccgtttatcggctggcttattatcatcgtctttaactgccaggcgggtacgccaggcgaaaaccgctttggaccagatccaaaactggaaccttaaaacaaatctgctcgccggatgtctgactcatccggcttttatcattatgttgatgaatgaataatttactaatgtttatttaaaatatttcaatgtcgttatataaattacctataaaaaataaccatgtatttatcttaaatatcaaaacctttataacatccgaaaaagaaagatacgaatagcatttacacaatacccggaatagactttcgtcacttttaattaaagggatgtttttatgcagtggtatttgtccgtattaaaaaattatgttggtttctctggtcgcgcacgtcgtaaagagtactggatgtttactctgattaacgccatcgtcggcgctattatcaatgtcattcaattgattttaggtctggagcttccatatctgtctatgctttatttgctggcaaccttccttcccgtccttgcgcttgctatccgtcgcttacacgataccgaccgtagtggtgcctgggccttgctcttttttgttccgtttattggctggctcgtgcttctggtttttttctgcacagaaggtacttctggcagcaatcgttacggaaacgatccgaagtttggtagtaattaatcttagaattggggcgatatttcgcccctttttattaacaataataaatattattttccgttaaaaagtttgggaatttcccgcagacaccaggatttcgcttcccccatactgtcacgacgccaggccataataatatcgatctcgctggtgctttccgggctgacgacacgcaaccgcccttccgcaatatctttttcgaccataggatacggcatcgtcgccacgccaagccccgccagtaatgcctgacgtttatcttcaatcgtgctcaccgttaagcgcggctgtttgtccagcagctgtacggtcaacaccgggcgctcacgagcggtatccgccaccgcaattccacgatatttcacacgcgtcacttcagataacggttccggctcctgatgaatcgggtgatcaggcgcggcaacgtagacgttcattaacgtatagagcttgcggctgttgatctcgctgctggaacgaaaatgcatatccggcgcgataacaatatccgcccgcccctgctccagccgttcccacgcccccgccagcacttctgtgatgattgccagttgggtattggcttttgccgccagtttgtcgattaacgggaaaaaggcaggtgtcggtaccagcgcttcggtcacaatggtgagatgcgtttcccaaccgcgcgcgagagcttccgcatcagtagtcagtttatctgcggcttccagcaaaacgcgccctcgctccaacaacatcctcccgacattggtgaatttggtacgatggccgctgcggtcaaacagcaccacatccagctcttcttccagtttttgcatggtgtagctaagtgcggaaggcacgcgtcccagctcatccgccgccgccgcaaaactgccccggcgatcgatcgcatccataacccgtagtgcttccagcgttaatgccctttctttggccatttcgttctcattcaggaaatttgaacataccgggcagaatatctggctaacaatgtagcgtccagccccttaccataaaaggaagtaaagagaggtcaagaattatgattactacccgaactgccaggcagtgtggacaagcagactacggatggttgcaggcccggtatactttttcctttggacactacttcgacccgaaattgttaggctatgcctccctgcgtgtgcttaaccaggaagtgctggccccaggtgccgcctttcagccgcgaacctatcccaaagtcgatattttaaatgtgattctggatggagaagcagagtatcgcgatagcgaaggcaatcatgttcaggccagcgccggagaggcgttgctgctctctacccagccgggtgtcagctatagcgaacacaatctcagcaaagacaaaccgttaacgcgaatgcagctttggctggacgcctgcccgcagcgagagaatccgctgattcaaaagctggcgcttaatatgggcaagcagcaattaatcgccagcccagagggtgcgatgggaagcctgcaattacgccagcaagtgtggctgcaccatatcgtgctcgacaaaggcgaaagtgcgaatttccagttgcatgggccacgcgcgtatttgcaaagcattcacgggaaatttcatgcgcttacgcatcatgaagagaaagcggcgctgacctgcggtgatggggcgtttattcgtgacgaggctaacattacgctggttgccgattccccactgcgcgctttgctgatagatttgcctgtctaattgtttttacagggagatgatgatgagtaaaaaattggccaaaaagcgccagccggtgaagcccgtggtggcgaaagaacctgctcgcaccgccaaaaattttggctatgaagagatgttgagcgagctggaagctatcgtcgcggatgctgaaacgcgtttagccgaggatgaagctaccgcgtaaagacaggttgccggatgcggcgaaaacgccttatccggcctacaaaatccaacaacattaacgaattaaacaacccgtaggccggacaagatgcgccagcatcgcatccggcacgatccccaaaacctggcgtttatctggccttgctcgccataatctcgataatctgccgatccgtttgctgcatgctatggcttgctaacgcacacaggttggcaatgctctgctcaacatcatgcgccacaatcccttcattgccggtcacggcggtatcatccagcgccattaacaccgctttccacgcagcgctagcactggtgctaaccttcatcgcgcagctgttgctcgcaccatcgcaaatcatgccgctgacatcgccgatcatactgctgatcgccatgctgatggtttcataacgcccatccaccagccatgccatcccggcggcggcccccattgctgcggtcgttgcggcacacagcgcagacaaacgcggtaactggttatggatgtaaattgcgctcaaatggctaagcatcagcgcacgcgccagccgttcatcatccgctccgaagtgttctgctaccaccaccacaggcattgttgcggtaatcccctggttaccgctgccggagttactcatagccggaagcgtagcgccgcccatacgcgcatcggatgccgcgctggtacgaatcacaatggaactagagagatctttcgccagcaaaccgcgctcgcactgtttttccagcgtcgcgccaatatgcagcccccacttaccgctcaaaccttcctggcttaacgcacaatttagcttcgcggaatcgagaataaagcggatcgccgcaaacgggacttcattgacgaacttcaggatctcagccagcgtcgttctggaaagcaccgtcagcggagactcttgctcgccctctgccacacacgcctgctgggtaaacaccacaccatcgtgcgtctcgatatgcacaatgttggtatgcccgccgacgatggtgacacacgcccacttctcaccgttccagactttggcgcgactgaagaggatttcatcgcaaggttcctggatcttaacggagactttccccgccgccagcagtgctttggcatcggcaattgcctgcgctgttgcgtctttcagcacttccagcccggcgttggcatttccacctaacgcccccagcgccgccgcaatcggcagccccaccattcccgtgccgggaacggtgacgcccagaccgttcttcatcagatttgggctaacccaggcttctacacgttcaaccggaccttccagttctgccgcagcaaccgccgccgccagcgccagactaatcggttcagtacatcccagcgccggttttacttcctcctgaacggcgaggatgtaacgctgccataacggatttaaagtgctatcaaacatattaaaaaccttaaaatttcaggtaaatcaagaaaatgccaggaacggagaaacacacagcaacaaaccagtgacgataatcaggtacagagacatccctttgtatttgtgcaatgctggtactttgtaaaccagccacgccgggatcaggcaccctaccatgccgaaaatcgggctacagatagaggtgaagctcaacaccggtgcgttcagtacgatggcgctccaggccagcaaaatggcgaaaatcatgatgccgcgctgaacgagattttcgttaatcttctcggcaggcatcttgcgacgcaggatgttcattacgatcccttgcgttgcttcgcgaaagcctaaatagacgccaaagaatgcagtcatgacagcaaagatattgagaatgacgctgaccactttcacccacgctgcgccgtcaccgctaataaactgtgcggcaatcgccagcgcggaaatattctgctcataggcttttaccgcttcgtcatgtcccatcgccagcgtgaagctcacggcgtagaaaaagacggtgacaaacaaaatgccaaacgcgatattcattgcccgcaatgctttatgccgcgccacttcaatacttttttcccggctgcgataagagatcaccatcggacttaacgtctggataaacagaatgctcgtcagggtaaacggcagcgtaataatggcgtttttcaccagcagccccagcggcggtaggctaccgacgttatacagatgccacattcccaccatgctcacgcccagcgccgcgaccaccagcagcttggtcagcaccatgccggtgctaattttgaataacaatttctcgccgcgactggagatcgccaccagaatgcaaatcagtaccagaccataaaagggactgtcactcagcaacccttccgtcacgccgaaggtatgcaggtaggaagcactatcgttggtgatggcggtggaatagacgaacatccaaatcaccagcattacgaaatagagcgcacctaacaggatgccccagtttttacctaaataaccgctaatgacgctcgggtaatctttacattctggactttctgccagcgtattaataaacaatcgctgaaacagatacattgccgggtaaccaatcacgctactgagcaaaaatacccacaatcccatcaaaccgacctgcaccgggagaaaaacaatccccgcgccaatcgccatcccgatactcataatcacccagccggtgtcagtactgtcgaatttgatcgcttctcgccactcgctctcactcattccagcacgacccgccggggtcgaagcgtctgcaatgacgcctttattcgatgcaatttccataatttctcgctcaatattttgtagggcttattatttttttccgagccgcatcaaggcgatatgcggtctacgtttttgcaggcgagttattagaataaagaaatgatacgcgcgaggtcagagaaaatcttcacaatcaagactttgaaataacggagatggataagaattttctactaaattaatcgcaggagaatattcattctctatttgcggcagatcacaaaaaaaaggtgcacatttgtgcacccaaggatgaaagctgacagcaatgtcagccgcagaccactttaatggccagtcctccgcgacttgtttcgcggtatttatcgttcatatctttgccggtttcatacatcgtctcgatcactttatcgagactaacacgcggtgcgctggtgcggcgcatcgccatccgcgcggcgtttactgctttcacggcattaatggcattacgttcaatgcacgggatttgtacctgtccggcaaccggatcgcaggtcagcccaaggttatgctccatcgcgatttccgccgcattgcatacctgcgccggactgccgcccagtagttcagttaaccctgccgccgccatactacaggccacgccaatctccccctgacagccgacttccgcgccagagatggaggcgttcattttatacagcgcgccaatagcccccgcggccagaaaatagcgggcaatactccgctcgtttaccggacgacggaacttatcgtaataagccagtactgccggaataatgccgcacgcaccgttagtcggtgccgttaccacgcgcccgccagctgcgttttcttcactaaccgccagcgcgtacatgttgatccagtcgatgacattcatcggatcgttagagatgttatcgctggaaaccagctgacgacgcagcgctacggcacggcgcggcacattgagcggaccaggcagcacgccttcagtgttcatcccacgttcaataccgtcatgcatcacttgccagatacgggcaaaaccggcgtcaatttccgctttgctgcgcagcgctagctcgttgtgcatcatcagaccagatatagacaggccgttgtaatcacacattttcagcagttcacctgcactgtggaaatcgtaaggtacggacgtttcgacatcgtggctcaggccgaagtgttcttcttcgacaataaacccgccgccgacagagtaataggttttacttaatagctcttcctgtcccttccaggcagtgatccgcattccgttctcatggcgaggcaacatttcgggatggaagataatgttctttgctacaggaaaatcaacaatatgcgcaccagatgccactggcagccgcccgctgcgcgttactaactctataaatgcagggatctcatcaatgacaacatcctgcggactgtttcctgccagtcccatgatgatggcgacatccgtggcatggcctttgcccgtcagactcaagctcccgtacagatcgaccacaatatggctcgtcgcggttaataagccgctactttccagccgatcaataaaactttttccggcattcattggccccacggtatggctactggagggaccaatcccaattttgaaaatatcgaatgcactaatcatatccacaccctcggattgccgttcagtgaagtggagcggaacgaccttacgaccgtcccgctcacgaggctttacgcactacgtactgcgatggcttcaatttccagcttcacatctttcggcaaacgcgcgacctgcacacagctccgggtcggataggtcgcctgatgctcatcgaagaactgcttatagacttcgttgatggtggcaaaatcattcagatcggtgataaacacggtcatcttgatgatatcgcccacgctcagcccggcagcaaccacgatcgctttgacgttttcgaggcttaaacgcgcctgatcttgcacatcagccgggatctcaccggtctgtgggcaaaccggtatttgcccggaggtgaagaccatgctgcctaaatcaacgccctgaacataagggccgattgcgcctggggcacgttgcgtttcgataatctttttcatacatcctccggcgtcagagcgcctgggtaaaggtacgactaataacatcctgttgctgttcacgggtcagtgcgttgaagcgcacggcgtagccagagacacggattgtcaggttaggatatttttccgggtgctcgatggcatccagcagcatttcccgattcattacgttgacgttgaggtgttgaccgccttcgacatccgcttcgtggtggaaatacccatccagcaggccgacaaggttggttttacgtactggatcttctttgcccagcgccgcaggaacgatactgaaggtgtagctgatcccatctttggcgtaggtgaacggcagtttcgccacgctcgtcaaactggccacggcacctttgcggtcacgaccatgcatcgggttagcgcccggcgcgaacggtgttccggcgcgacgaccgtccggcgtattaccggttttctggccgtacaccacgttagaagtgatagtcagaatgctctgggtagggacggcgttgcgataggttggcagcgctttaattttcttcataaagcgttcaaccaggtcgcaggcaatgctgtctacgcgctcgtcgttgttgccgtactgcggatattcaccgtcgatttcaaagtccaccgccaggccgttttcgtcacggattggtttcacgcgggcatatttgatggcagacagggagtccgtcgccacgctcaggcccgcgatgccgcatgccatagtgcgatagacatcacgatcgtgcagcgccatcaggctagcttcgtagctgtacttgtcgtgcatgtagtgaatgatattcagcgcgctgatgtactgcaccgccagccagtccatgaagtgatcgaggctgtccatcactttgtcgtaatccagcacgtcgtccatcagcggtgctgttttcggcccgacctgaatcttcagcttctcgtccaccccgccgttaattgcgtagagcagcgttttcgccaggttagcgcgtgcaccaaagaactgcatttgcttaccaatcaccattgggctgacgcagcaggcaatcgcgtaatcgtcgctgttgaagtcagtacgcatcagatcgtcattttcatactgcaaggaagaggtgacgatgctcacctgcgcggcatattttttgaaggcaatcggtaattcttcgctccaaagaatggtcaggttaggttccggtgccggccccatagtgtgcagggtgtgcaaatagcggaaggagtttttggtcaccagcgtacgaccgtccagccccatcccgccgatcacttccgtcgcccagattgggtcgccggagaacaggctatcaaattccggtgtacgcaggaagcgtaccatacggatcttcatgatgaagtgatcgatcagttcctgtgcctgctgctcattgagtacgccagctttaaagtcgcgctcaatgtagatatcgaggaagcttgccgtgcggcccaggctcatcgcgccgccattttggcttttcactgccgccagataagcgaagtagagccactgcaccgcttcctgcgcattctgcgccgggcgagagatatcaaagccatatttcgccgccatttcctgaatctgcaacagcgcatgacgatgctctgccagctcctcacgcagacggatggtggcttccagatcctcgcctttttccagacgagactggagatcggcaaattgcagttcgcgttcacgtaccagataactgatgccatacagcgctacgcggcgatagtcaccgataatgcgcccacggccatagccatctggtaaaccggtcagcacgccagatttacggcagcgcagcatatccggactgtaaacatcaaatacgccctggttatgggttttacgcagatcggtaaacagatattcaaattcactgtccatttctcggccataggcgtggaaactacttttaatcatattaatgccaccgaacgggtgtagcgcacgtttcaacggcgcatccgtttgcaggccaacaattttttccagcggctggttaatatatcccgcatcatgagcggtaattgtggtggcaatattggtatcgaaatcaaccggcgcgtgggttgcattttcgatacggatgccttccattactttttcccacaattccgtggtggcaggcgtcgcttcggcgaggaaagattcatcgccttcatacggtgtatagttatgttgaataaaatcgcggacattaatttcgtttttccagtccgtacctttaaagccaagccatgcgtcggcgtacagcttatcgctggtatcaatatctaccttcatgaaaaataatctctctacaatacttcaactaaattatgcaaattctgcgggcgcgttaactttgcctaaatgaatggcatccaaagcaatcattttttcttcgttagtcggaataacggcacaaatgacacgcgcattttcactggaaacaattcgctcaccacaggagttagagcgattattcatttctgtatcaatctctaagcctaatacagccaaatgttccatgaccagacgacgaattaagctactattctctcctattccgccggtgaatataattccatccaggcgacgtaaactagctgcgtgtccggcaatatgacgggcaattcggtgaacaaaggttttaattgccagttgcgcgcgttcgtgaccttcatgccaggctttttccagaacacgtaaatcgctagaaagaccggaaatacctaataatccgctctctttattcactacgcgttccaggtcacccaggctctggttggtttggctggcgacccaggacatcgcaccaaagtcgacatcgccactgcgggtacccatcatcaagccttccagcggcgtcattcccatactggtatcaacactctgaccgttgcgaaccgcgcagatactcgcgccattgccaagatgcgccacaaccaggccggagtcatcttccgccagattcagcaggctatgtgcgcgctgggaaacatagcggtggctcgtgccgtggaaaccataacggcgtacacctaactcttcataatatttccacggcaggccgtataaataagcttccggagccatcgtctggtggaaactggtatcaaataccgccacctgagttacgcccggaaataattgctgcgcgctttcaataccacttaaattggcgtaattatgcaggggtgccagtggagaaacgcgacggatattatcaatgacttcatcggtaataatggcggactcggtaaaaatactgccgccgtgagcgatgcggtggccaattaaggccacactgtcatttaaattccgtttttccagttcaaatgcaattgccttcaatgcaccttcgtagctgtggtgagccagcggtgctggctctcccccatttacggataagaatgcattttcgctgttaataccgtcggcaataccactcattaatacttcacagtcgctggcatcgagcacggaaaacttaatgctagagctaccacagttaataaccaaaacaaccggaaattcattcatctcttttctcatcctgagttacggattaaaacagtttgtatacgatgttcaggatggtcagcagaccaatcacggtaacaaacacgttatccagacgaccacggtatttcgccagagacggcgctttacggatggcatacatcggcaacaggcacagcagggatgcgataatcggtgcgcccatggcttcaatcaggtcaaggatgttcgggttggcgtaggcaacaacccaggtggagcccatgatgaagatcatgctgatagtgttcagtttacccaggctcactttagttttgtcgcctttataaccaaacttcaggaccaggccattcagaccttccagcgttcccagatagtgaccgaagaaagatttgaagatagccacgagtgcgatgatggaagccgcatattccagtgtaatcgcgaacgttgttttggtaccggtcatggacgcaaagtggttagccagataagaaagcactggaatattctgcgctttggcttccgccatgttggccggagacagagtaaacaggcagctaaaggcaaagaacatcaccactgcaaccatcagcatgctggcacgagaaatgatttgggaacatttacgttcggtgaagtcgcgaccgaagtctttctcatactcttcacgcttagaaaccacgaaggaagagacgattgggctgaagttaaaggagaaaaccatgatggaaatccccagccagacagtgatcaggataccgtcatgaccggttaagctcaggctaccgaggtcaacctggtcgataactgcagagttccagtaagggatcaggctcaaagaaatcagcaccaggctggcgataaacggccataccaggtagctcatcactttaaccatcagatccttaccaaaccagatgacgaaagccatcagcagcaacaggaacagcgccacaaagccgcgattcagcggtgcaaagccgagctggttttcccagaacgtcataaaggtattggtaatagtaacgccataaatccacagcagtgggcaaatcgcgaagaagtacaggaacgtgataaccacgccgccagttttaccaaaatgctcttccaccgtttccgtaatgttgccggaagggttagagccagaaagacacagacgcgccagcgcccggtggcaataaaacgcgatggggtatgccaataccaacatcagaagaatcgggatcagtccgccaaaacctgcgcggatagggaagaacagcaccccggcgccgattgccgtaccaaacaagcctaacgtccatgtggtatcacttttacgccaggagctttgttttgtctggctggatacaatgctatcactagtactcatatcctatcctcaacgaattaattaagcgtcaacgaaaccggtgatttgagagacgcgagaaagatcgatattgccgccggaaataatactgacggtttttctgttttgaatatattggtctaatttaccgcttaataatgcagcacatgccagagcgcctgcgccttcggtgacgactttattgcgctgaattaaggcaatcatactgtttctgatttcgtcttcgctgaccagcacgatgtcatcgactaattcacgaacgatttcgtaagttaaattacccgggcgggagacatcacaaccatccgccagggtgccggtagttcggtgcgtggttatttctccggagtggaaagaagccgccatgccgtgaacgttttcagactgtacgccaataacacgaatggtcgggttaatagatttaattgccaccgcaataccagcaattaaaccgccaccaccaattggcacaatcacgttatcgacatcatagagatcttccataatttccagaccaatcgttccctggccagcaatcactttcggatcatcgtaaggtgggataaaaatacggccttccatttcgacaatttcgctcactttagcgatagtgtcgttgaagttatcaccatgcagaacgacttctgcggagtagtcgcacgttgccgctactttggattttggcgcaccttttggcatcaccactttaccgtcgatacccagcatcgcgcaggagagggaaaccccttgcgcatggttgcccgcagaacaggccaccacgcctttgcgtttttccgcatcggtcagactacttaatttattaaatgcgccacgaattttaaaactacccgtacgctgcatattttcaaacttcaggaatatttcacctttgcaacgttcactaaaatagttggagcgaggcatgcctgttttataaattcgcccagccagtcgttgtttcgcttcaataatgtcatcaatagcaaccggcagatcgtatgtaatatgcattataaaacctcttcgcctgaattaaatatgtaggtaaccgtaaccgacacctgcaagacagacaggtggattatttatgtttaaataaaaacaaataattaaccaacttctattaattgccttcgtctacacccattataagaactatactctttggctaattccaccaaaacgcttgctgcttttttaatacgataatttttgctccataccgcggcatattgtgccacaggtaatgtttcttcaaccggaatagtaataaattgattagaaccaaaaggactcgtcatatcacaaggaattacagttaagaaatcagcattgagaacaagattataaattgtcacgacactgtcggttttaacgatgttttcaatactgatgccatttctttgtaacgtagtaagcagttcgctgtagtaccccatattagtttgtggcaacacccactgttcgttcttcaagctctccagcgtggtggtgccggtgcatgttcgggacttactggctaccagcacaaactcggactcgaacagcggctcaacatgtaaatcctgaagcttcatttctgcacttaacgtaccaatcgcaaaatccagtcgaccgtcgcggattgccggtaagaagctagacagttgcgcttcatacatagaaacctgcgctttcgggaacacctctttgaacttgttgatcatcccactcataaaagtaaaaccaatcaaactaggaaaaccaaaactgacttccaccaccgcctcagaagacataccgcttatctcattaaccatatttttcatttcacgggtaatggattcggaacgggagagtaacaattgaccggcaggtgttaatgttacaccggtatttttccgcaccactaattccacaccaaaataatcttcaatatcgttaatgattttactgacggccggttgagttaaccctaattcttttgcagcgctgccgatagaaccacttctaatgacttcctgaaagactaccaggtgctgcgttttcggaagaagaatagtgctcataacgacctacgttaattacctcattgacggcatgaagtgtatcaaaatgaaatgaacaggatatgtgcgaccactcacaaattaactttcaatactttccagagtatcgttattacaattaaatacctttaaatatcaacaagttaaagtataaaaatcagcataaaccctgatttttgtcaaaaaaaatgacggggataaccatattttatggcgataacatcattcgttatgtggttaatacaaaaaaggggctgagaccatatttcaagcaattaccggataattaccaggcaaaatttgagttaaatttaatgagcaagttcagtaattttattataaataaaccatttagtgtgataaataatgcggcatgtcacatttttagtcgctatttgttggagaacaaacatttattttatcaatattttaaaattagcaatacatgtattgatcatctcgaacaattgattaacgtcaactttttctcttctgacaggacgagtttttgtgaatgcaatcgttttccataaattcttctcccctcataggcgacgaatagcattttgtgttgaggatcacaaaacgaataattgctgatcgccgcgataaggtcagacaaagacaacaagggaaattttcacagagcttttgatcggcgtaggccacagaatgttgcttcgtttactgtaacgccgggtaaatgagcgttttttgatagtgcgaaagaaccctgcgaggaaaataagcatctattattgtttgtcatgatgacaaggcaggcatcaatgaaaggcttcccaattgcgcatatttttcaccctagtatcccgccaatgcacgcagtggttaacaatcacaatagaaatattgattattggacggtaaaaagaaagtttgcagaaattgtctccaccaatgacgttaataaaatttacagtataagtaatgaactgcggagagtattatctgcaataactgcattgaatttctatcatggcgatgttccttctgtcatgatccgaatccaaccggaaaatatgagtccattcattatagatatttctacaggagaacatgatgattatatcatacaaacattagatgtaggcacttttgcaccttttggtgaacaatgtacttgcagtgccgtcaataaaaaagagctggaatgtattaaggagacgatttctaagtattgtgcaaaattcacccgaaaagaagccatcttaaccccccttgtgcactttaataaaaccagcattactagtgattgttggcaaattctcttttttagtcccgatcattttaataatgatttttattgattatttataaaggataaaataatgttccctgttagtagtattggtaatgatattagtagtgatttagtccgtcgaaaaatgaatgaccttcctgaaagcccaacaggaaataacctcgaagcactagcaccaggtatagaaaaactaaaacagacctctattgaaatggtcactttacttaacacgttacaacctggtggaaaatgcattatcactggtgattttcaaaaagaattagcgtacttacaaaatgtaattctttataatgtcagctctcttcgtctggattttttaggttataacgcccaaattattcaacgaagcgacaatacttgtgaacttaccattaatgaaccgttaaaaaaccaggaaatatccacaggtaatatcaatattaattgcccattaaaagatatttacaatgaaatcaggaggttaaacgtaatttttagttgtgggactggagatatcgttgatctatcctctctggacttacgtaatgtcgatttagattattatgatttcacagataaacatatggctaatactattttaaatccttttaaattgaatagtacaaattttactaatgccaacatgtttcaggttaattttgttagtagtacacaaaacgccacaatctcctgggattatttactaaaaataacgcctgttttaataagcattagcgatatgtattctgaagaaaaaatcaagtttgtcgaaagttgtttaaatgagcctggagacattaccgaagaacaattaaaaattatgagatttgcaattataaaatctataccaagggcaactcttacagataaattagaaaatgaattaacaaaagaaatatataaaagcagtagcaaaatcatcaattgcttgaacagaattaaattaacagagatgaaagaattcagtagtgaaaaaatatatgattacatcgatataatcattgaagattatgaaaataccaaagaaaatgcttatctggtcgtcccccaaattaattatactatggatttaaacatagaagactctagcagtgaagagttacttagtgataataccctcgagaaagacgaaaattctccggacaatggctttgaggtcggggaatataacacatatgaagcatataacagtgagaagcaatattttaccagagaggactatacgtatgattacgaccttttaaatgcaatataaacttaataacttcttacaaagtctattattaataccgtagatatttattcatcttaccctgtgcaccaaaagcaaaaactcactgacgcgggtttgaaactgatggcaaccgcaaaaatgcctgatgcgctacgcttatcaggcctacgccatctctgcaatatattgaatttgcgtgcttttgtaggcaggataaggcgttcacgccgcatccggcatgaataaagcgcactcaacaatctgaaacccgccggaacggtttattacgtacatcaggtaaaactgaccgataagccgctttcttttgggtatagtgtcgtggacagtcattcatctttctgcccctccaaaagtaaaaacccgccgaagcgggtttttacgtaaaacaggtgaaactgaccgataagccgctttcttttgggtatagtgtcgtggacagtcattcatctttctgcccctccaaaagcaaaaacccgccgaagcgggtttttacgtaaaccaggtgaaactgaccgataagccgctttcttttgggtatagcgtcgtggacagtcattcatctttctgcccctccaaaagcaaaaacccgccgaagcgggtttttacgtaaatcaggtgaaactgaccgataagccgggttctgtcgtggacagtcattcatctaggccagcaatcgctcactggctcaagcagcctacccgggttcagtacgggccgtaccttatgaacccctatttggccttgctccgggtggagtttaccgtgccacggactgttaccagccgcgcggtgcgctcttaccgcaccctttcacccttacctgatcccgcttgcgcgggccatcggcggtttgctctctgttgcactggtcgtgggtttcccccccaggcgttacctggcaccctgccctatggagcccggactttcctcccctccgcccgtctcccccgaagaggacgacgacgaagcggcgactgtctggtcagcttcggcgcgcagtatagagggtttgcgcgcccttgtcaccccgcgttgcgcattccaatcgccagtgtcgcggcgatattacgactagcacggcagatattgtcataagccccgcggaatgcttcgtccaacgtacctatgctggtcaatacgctgaagaccgcatcaatgccatgctgatgtacaacgccaacatcatcggtcaggctacccgcaatgccaatcaccggtttatggtacttcttcgccacgtttgcgacaccaatcggtaccttcccgtgaatactctggctgtcaatacgcccttcaccggtgatcaccagcgtacaatcgtgaatatgttcctccagattcagcgccgtagtgacgatttcaataccacttttcagttccgcaccaagaaacgccattagcgccgcgcccataccacccgcagctcctgcaccggggacatctttcacatcaacatgcagcgcttttttaatgacctcggcatagtgagagaggttattgtccagctcaacaatcatcgcttcactggctcccttttgtgggccaaagatgcggcttgcgccgttatcgcccaccagcggattggtgacatcacaagcgacgcgaatgacgcaatcttttaagcgcggatcgaggccggaaatatcaatatcattcagagtattaagactaccgccgccaaaaccaatttcattgccgttggcgtcgcataatttcgcccccagcgcctgtaccatgcctgcgccgccatcatttgtagcgctgccgccaatgccgataataatgtttgtcgcaccgctctccagcgcctgcaggattaactcgcctgtgccgcgactagtggtcacgagtggatcgcgtttttccgcaggtaccagctccagcccactggccgccgccatttcaataaacgcggttttgccatcgccggagatcccccaactggcattcactttctcgcccagcggccctgtaacccaggcgtgacgttcagccccctgggtggctgcaatcatcgcttccaccgttccttcgccaccgtcggcaaccggaacagaaacgtactgtgcatcaggaaaaatttcccgaaatcctttttctatcgcctgcgcaacctcgctggcagataaactttctttataagagtctggggcgattacgattttcatacctatgcctgttaccacatgacgccggagggcgtttctcttattcggcctggattccaggcccggattgcaatacgccatccgggcacgacgtcattaacgagtaacttcgactttcgccagtttttcgtagtagcacgccagggcgctatgatccgccgttcctaaaccatctgctcgcagtgcctgcatcatctccataaccgcagctgtgagcggcagttgtgcgccgacgccgtgagaagtatccagcgcattcgccagatccttaatatgcagatcaatacggaagcccggcttgaagttgcggtccatcaccatcggcgctttggcatccagcacggtactgcccgccagtccaccgcgaattgcctgataaaccaggtccgggttaacgcccgctttagttgccagcgttaacgcttcactcatcgcggcaatattcagcgccacaatgacctgatttgccagtttggtgacgttacctgcaccgatttccccggtatgcaccacggaacccgccatcgctttcatcaaatcatagtatttgtcgaaaatagccttgtcgccgcccaccatcacactcagcgtaccgtcgatggctttcggttcaccgccgctcaccggagcatccagcatatcaatgcctttcgctttcagcgcttcgctgatttcacggcttgccagcggtgcgatagaactcatatcgatcaataccgtacctggcttcgcgccttcaataatgccattctcacccagcgccacctctttcacatgaggggagtttggcagcatggttatgatgacgtcgcactgttcagcgatcgctttagccgtagacgctgtttctgcacctgcagcaatcacgtcagcaatagcttctgggttacggtcagcaaccaccaggctgtaacctgctttcagaaggtttttactcattggtttacccataatccccaggccaataaaaccaactttcatagtcatatcaatcatctctcttgttgcggtggtggttattttttaaaggtatcagccagtttctgagtggcagagcggaagacgccgagatcgctgccgacagccacaaacgtcgcgccccattccagataacgacgcgcatcggcttcgaccggcgcgaggataccgctgggtttgccgtgcgcgctggcacggttaaaaatgtgctgaattgctttttgtacatccgggtgacttgcattgccgagatggcctaatgccgcggccagatcgctggggccgacgaagatgccgtctacgccttcggtagcggcaatggcatcgacgttatctacgccctgctgactttctatctggaccagaatagtgatgttcttgttgctctgagcgaaataatccgccacggtgccaaacatattggcgcggtgagaaacggagacgccgcgaatgccttccggtgggtaacgggtacttgccaccgccagctctgcttcctcttttgtttctacaaaaggaatcaggaagttatagaaaccgatatccagaagacgcttaataattaccggctcgttggtcggcactcgcactactggcgcgctggcgctgcctttcaaggccattaactgcggaataaacgtggagatatcgtttggcgcatgttcgccatccagcaccagccagtcaaacccagccaaaccaagaacttcagtgctaatcgggttagagagtgcactccagcaaccaatttgtacctgtttcgcagccagtgcggctttgaatttattcgggaaaacatcgttattcatcgcttatacctttgcttatttctgcaattccatacgtttaatgtcgccaactacgaagaggtagcagaccatcgccatcagcgcactacatcccacgaaaaccagtgctgcattgaaggagtgcagttcacttaccaggtagccaatcaccagtggagtgacaatggaggcaacattgccaaagacgttaaagacgccgccgcagaggccaacaatctctttcggcgcggtgtcagaaatcaccggccagcccagcgcaccaaatcctttgccaaagaaagccagcgccatcagcatgaccaccagcgtggtgttgttggtgtagttacataagatgatggtggaagccagcaacattcccagcacaatcggtagcttacgtgccagggtcagggataaaccgcgtttgatcagataatcgctgaagacacctcccagcacgccgcccgcaaaaccacacagtgctggaatgctggcgaccagacccactttcagaatgctcatgcctttttcctgcaccagataaatcgggaaccaggtgaggaagaaccaggtgatggtgttgataaaatattgtccgaaaaatacgcccagcatcatgcggttagagagcaattgcttgatgtaatgcagtttgggtccgcttgctgccgcactgcccggctttttgtggtccatatcgaccaccgcgccattttcagagataaacttcagctcttccgcagacatacgtgggtgatctgtcgggttatgaatcaacttgatccacagcgccgtcagcacaaaaccaatcacccccataacggtaaagacgtgctcccagccccaggcgaaagtcagccagccaagcagcgggctaaagagcgccaggctgaaatattgcgcgctgttaaagatggcggaggcagtaccacgttctttcgtcgggaaccaggcggcgacaattcgggcgttcgccgggaaacttggcgcttcgctgaagccgagcataaagcgcataaagaacatggagatccctgcccaggccagcgggaacatatcaacaaagccttgcaggaaggtgaataggctccagaaaaagaggctgtaggtgtaaacttttttgctgccaaacttatcaagcagccagccgccggggatttgcatcagcaagtaggcccagccaaaagcggagaagatgtaacccatgctaaccgcacttaactgcaactcttttgccacttcggtaccagcaatagacagcgttgcacgatcggcgtagttaacggcggtaacaataaaaataatcagtaatattaaatagcgggtatgcacgcctttctttttttcgtcaacggtgtccagaatcattttatttacctcgggtacttatgctgatttttattattatggggaaggtgttatttatgagtttcatttatgccgtaacgacaatgaactcgggaattagtataagcagcgcgagaataataatcattgtgcaaatgctaatttaattaatactatttaaatattattttgagcatatgcacataaggttgcgcgctaaagcacagatttgcgctttaccttaccgggcggcactgcaatccctgaaatgattgacattgatcacatttctgcgtttaaactcctgacattcttatttcacccaatgaagtcatttatttttaaatgagaccaggtcctcattttaataacccctggctggagaatattgcacaatggccaacatcgaaatcagacaagaaacgccaactgcgttttatataaaagttcacgacacagataatgtggcaattattgttaatgataatggcctgaaagcaggaacgcgttttccggatgggctggaattaattgaacatattccccaggggcataaagtcgcattgctggacattccggctaatggtgaaattattcgttatggcgaagtgattggttacgccgtgcgtgcaatcccacgcggaagctggatcgacgaaagcatggttgtactaccggaagcgccgccgttacacacgctgccactggcaaccaaagtcccggaacccttaccgccgctggaaggatacacctttgagggctatcgcaatgccgatggcagcgtgggcaccaaaaacctgctcggtatcaccaccagcgtccactgtgtggcaggcgtggtggactatgtagtaaaaatcattgaacgcgatctgctaccgaaatacccgaacgtcgatggcgtggtggggctgaatcatttgtacggttgtggcgtggcgattaacgcaccggcggcagttgtacctatccgtaccattcacaatattagcctgaatcctaactttggcggcgaagtaatggtgattggcctgggttgtgaaaagttgcagcctgagcgcctgctgactggaacggatgatgtgcaagctattccagtagaaagcgccagcattgtcagtttgcaggatgaaaagcatgtcggttttcagtccatggtcgaggatattttgcagatcgccgaacgccatctacaaaaactgaatcaacggcagcgagaaacctgcccggctagtgaactggtcgttggtatgcagtgcggtggcagcgatgcgttttctggtgtaacggcaaacccggcggttggctatgcgtctgatctactggtgcgctgcggcgcaacggtgatgtttagtgaagtaacggaagtgcgtgacgcgatccatctgctgacaccacgcgcagtgaacgaagaggtcggcaaacggctgctggaggagatggagtggtacgataactatctcaatatgggaaaaaccgaccgcagcgccaaccctagcccgggcaacaagaaaggcggtctggcaaacgtggtagagaaggcactcggctccattgctaaaagcggtaaaagcgcaattgttgaagtgctgagccccggtcaacgcccgactaaacgcggattaatttacgccgcgacgccagccagcgattttgtctgtggcacgcaacaggtggctagcggtatcacagtgcaagtgtttacgaccggtcgtggtacgccgtacggcctgatggcggtacccgtcattaaaatggcaacccgcaccgagctggcgaaccgctggtttgatttaatggatattaatgcgggcaccatcgctaccggcgaagaaactattgaagaggtgggctggaagttgttccactttattctcgacgtcgccagcgggaagaagaaaaccttcagcgatcaatgggggctgcataaccagctggcggtgtttaacccggcaccggtgacctgatttcttttggaacgtccctcgcaaaacatggccttagtgccatgtttttattgtttaaagcccccacgtccattaataatgcatttgcattaccttagttcaagcttataatttgagcagaaaacaggctgtaaaaggacagtgaatcatgcccgctaatgctcgctctcacgctgtactgaccactgaaagtaaggtcacgatacgcggacaaacaactatccccgcgccagtgcgtgaggccttaaaactgaagccaggccaggacagcattcattacgaaattctgcctggtgggcaagtatttatgtgccgactgggagatgaacaggaggatcatactatgaatgcatttttgcgttttctggatgcagatatccagaacaacccgcaaaaaactcgtccattcaacattcaacaaggaaagaaacttgtcgctggcatggacgtcaacattgatgatgagattggcgacgacgaataatggattttccacaaagggttaatggttgggcgctatatgctcatccctgttttcaggaaacctacgacgctttagttgccgaagtcgagacattaaagggaaaagatcctgaaaattatcagagaaaagccgccacaaagttattggcggtagtccataaagtgattgaggagcatatcacggtcaatccaagtagtccggcattccgtcatggcaagagcttaggctctgggaaaaataaagactggagtcgggtaaaatttggtgctggtcgttatcgtctcttctttcgttatagtgaaaaagagaaagtcatcattctgggatggatgaacgatgaaaacactctgcgcacctacggtaaaaaaacagatgcctataccgtattcagcaaaatgttaaaaagaggacatcctcctgccgactgggaaaccctcacccgagaaacagaagaaacccattgatggtgttcacaatgcccgccgaacgcattcgtgttgaccagcgggcatcctttctcactccccgaccagaatcacttcaaccccagcctttcgcagtccttccaggctatccgcaggaatgccttcatcaacaatgatcatgtcgatacgttgagtatcaatgatcttatgtaaactggaacgattgaacttactggaatcggtgaccacgatgatccgttccgcaacttcgcacatccgacggtttaaacgagcttcatcttcattatgtgtgctgacgccgcgctccagatcgatcgcatctacaccaagaaacagcatatcgaagtggtaattttgcaggctttgctcagcctgatcgccgtaaaaagattggctctgacggcgcaaatgcccgccggtcatcagcagctcaacgccttccgcttccagcaacgcattagccacgttcataccgttggtcatcgcaattacgtcagtgtgcttgcgcatcagacgagcaatctcaaaagtggtggtcccggaatcgaggataacccgatgacctggctgaatcaactcaacggcagctttcgcaacgctgcgtttcatcgcggtgttcagtgcgcttttatcttccacacttggctcgacactcggcgtcgtgctatcgcagatcaacgcgccaccataggcacgcacagcgatcccctgcttttccagaaacgccagatcgttgcggatcgtcacagtagatacgccatacaatgcgctcagatcgttaacctgcacactcccttgctgtcgcagacgctgaatgatctgttctcgtcgctcgctggtgccagtcactcgcttctcaccactagcgtcggtattactcatagtaagtcctttcgtaaaactttcgtttcatttcgttttgcctattaacgcctttctattaagcaaatgcaagcccaccttgcccattgacgcaagctactctcgtttcagtgactttcattatgtttcttttgtgaatcagatcagaaaaccattatctttcgttttatttttatctcaccatgacgcagtatcaactgaaacaaaacgaaagattaatatcgcagtaatctgaactggagaggaaagtgaaacatctgacagaaatggtgagacagcacaaagcgggcaaaacaaatggaatttatgccgtttgttccgcacatccgctggtgctggaagctgcaatccgctacgccagtgcaaaccaaacgccgttactgattgaagcaacctccaatcaggtagaccagttcggcggttataccggaatgacgcccgccgattttcgcggctttgtttgtcagctcgccgacagcttgaatttcccgcaggatgcgttgattctgggtggtgaccatctggggccaaaccgctggcaaaacctgccggccgctcaggcaatggccaatgccgatgatttgattaaaagctacgttgcggcaggattcaaaaaaatccaccttgattgcagcatgtcctgtcaggacgatccgattcccttaactgatgacatcgtggctgaacgcgccgcccgtctggcgaaagtggcggaagaaacctgtcttgaacactttggcgaagccgatctggagtatgtcattggtaccgaagtgccggtacctggcggcgcgcatgaaaccttaagcgagctggcggtcaccacgccggatgccgcccgcgccacgctggaagcccatcgtcacgcctttgaaaagcaaggtttgaatgccatctggccacgcatcattgccctggtggttcaacccggcgtcgaattcgatcacaccaacgttattgattatcagcccgccaaagcgagcgccttaagccagatggtcgaaaactacgaaacgctgattttcgaagcgcactctaccgattatcaaacgccgcaaagcctgcgccagctggtgattgaccactttgccattctgaaagttggcccagcgctgaccttcgccctgcgtgaagctctgttctctctggcggcgattgaagaagaactggtgccagcgaaagcctgttctggtctgcgtcaggtgctggaagacgtgatgctcgaccgcccggaatactggcaaagccactaccacggtgacggcaacgcgcgtcgtctggcgcgtggttatagctacagcgatcgcgtgcgctattactggccggacagccagattgatgacgctttcgctcatctggtacgtaatctggcggatagtccaattccgctgccgctgatcagccagtatctgccgctgcagtacgtgaaagttcgctccggcgagctgcagccaacgccacgggaactcattatcaaccatattcaggacatcctggcgcagtaccacacagcctgtgaaggccaataagcaaaacaaagaggaacacgctatgccaaatattgttttaagccggattgatgaacgcttgattcacggtcaggtcggcgttcaatgggtcggatttgcgggggcaaatctggtgctggtagccaacgatgaggttgccgaagatccggtacaacaaaacctgatggaaatggtactggcagaagggatcgccgtacgtttctggacgctgcaaaaagttatcgacaacattcatcgcgccgccgatcgacagaaaatcctgctggtttgtaaaacacccgccgatttcctgacgctggtgaaaggtggcgttccggtgaatcgcattaacgttggcaatatgcactacgccaatggcaaacaacaaatcgccaaaacggtttctgtggatgcgggcgatatcgcagcatttaacgacctgaaaaccgctggggtggaatgcttcgttcagggcgtcccgacagagcctgctgtggacctctttaaattactttgagggattcatcatggaaatcagcctgttgcaggcatttgcgttgggcattatcgcctttatcgctggcctggatatgtttaacggcctaacccatatgcaccgcccggtggtcctcggcccgttggtcgggctggtacttggcgatctgcataccggaattttaaccggcggtacgctggaactggtgtggatggggctggccccgctggcgggcgcacagccgcctaacgtgattatcggtactatcgtcggcacggcgtttgccattactactggcgtgaaacccgatgtcgcagtaggtgtcgccgtacctttcgctgtcgcagtacagatggggattaccttcctgttcagcgtgatgtccggcgtgatgtctcgctgcgacctggcaacaaacccgcgccgcatttgatgctggtgccgacggcctggtgcattgctataacgggatgacaggtttacatcaccgcgaaccgggaatggttggcgcgggattaacggacaagcgcgcctggctggaactgatagccgatggtcatcatgtgcatccggcggcaatgagcctgtgttgttgctgtgcgaaagagagaatcgtactgatcaccgacgcgatgcaggcagctgggatgccggatggtcgctatacgttatgtggtgaagaagtgcagatgcacggtggcgttgtccgtaccgcgtctggtgggctggcgggcagtacgctgtctgttgatgcggcagtgcgcaatatggtcgagttgacgggcgtaacgcctgcggaagccatccatatggcgagcctgcatccggcgcgaatgctgggtgttgatggtgttctgggaagccttaaaccgggcaaacgcgccagcgtcgttgcgctggatagcgggctacatgtgcaacaaatctggattcagggtcaattagctagcttttgatagtttgctcctttattgggccttcacttcccccgtaaggcctttctttttctttcgttttgatctgtgcagcggtgtcggatgcgacgctaacgcgtcttatccgacctacagttggtgaccgcaaggccggataaagcgtttgcgccgcatccagcaatcccttttgcttcctttatcttttctttcaacgatcacaaatttcgttttatttcttttttctccattgaactttcagtttcttttctatagattttaatcaacgaaagacatcaccaagtgaaatgaaacgaaaggcaagtgaaagcgacaacgcccgacgtcaagttcatcagactaaggattgagttatgccagaaaattacacccctgctgccgccgcaaccggtacatggactgaagaagagatccgccatcagcctcgcgcatggatccgtagtctcaccaacatcgacgcgctacgttccgcgctcaataacttccttgaaccgttactgcgcaaagagaatctgcggatcatcctgaccggagccggaacgagcgcatttatcggtgacatcatcgcgccgtggctcgccagccataccggtaaaaacttcagcgccgtaccgaccaccgatctggtcaccaatccgatggactacctgaacccagctcatccgctgctgttgatctccttcggtcgatccggcaacagcccggaaagcgtcgcagccgtggaactggcaaatcaatttgtaccggaatgctatcacctgccgatcacctgcaacgaagcgggcgctctttaccaaaacgcgatcaacagcgataacgcgtttgccctgctgatgcccgcagaaacgcacgatcgcggctttgcgatgaccagcagcattaccaccatgatggccagctgcctcgcggttttcgcacctgagacgatcaacagccaaaccttccgcgacgtggcggatcgttgccaggcgatcctgaccagtctgggcgatttcagcgaaggtgtgtttggttacgcaccgtggaaacggatcgtttatctcggtagcggtggcttacagggcgcagcacgcgagagcgcgctgaaagtgctggaactgacggcgggtaaactggcggccttttatgattctccaaccggattccgtcatggaccaaaaagcctggtcgatgacgaaacgctggtggtggtatttgtctccagccacccttacacccgtcagtatgatcttgatctgctggctgaacttcgccgtgacaaccaggcaatgcgtgtaatcgccatcgccgcggaaagcagcgacatcgtcgctgccggtccacatatcatcctgccaccgagtcgtcactttatcgacgttgagcaggcattttgcttcctgatgtacgcccagacgtttgcactgatgcagagcctgcacatgggcaatacgccggataccccaagtgccagtggcaccgttaaccgcgtggtgcaaggcgtaatcattcatccgtggcaggcataagaggatcgcattatgagcattatctccactaaatatctgttacaggacgcccaggccaatggctacgcggtgcctgcttttaacattcataacgccgagacgatccaagcgatcctcgaagtgtgcagtgaaatgcgaagcccggtgatcctcgccggaacgccggggacctttaaacacatcgcgctggaagagatctacgccctgtgtagcgcctattccacaacctacaacatgccactggcgctgcatctcgaccaccacgaaagcctggatgatattcgccgtaaagtccacgcaggtgtgcgcagtgcgatgatcgacggcagccacttcccgtttgccgagaacgtgaagctggtgaaaagcgttgttgacttctgccacagtcaagattgcagcgtggaagcagaactgggccgcctgggcggtgttgaagatgacatgagcgttgacgccgaaagtgcattcctgaccgatccacaagaagctaaacgctttgtcgaactgactggcgtcgacagcctggcggtagcgattggtacggcgcacggcttatacagcaaaacgccgaagattgatttccagcggctggcggaaattcgtgaagtggtggatgttcctctggtgctgcatggtgccagcgatgttccggatgaatttgtccgtcgcactattgaacttggcgtcacaaaagtgaacgttgccacagaattaaaaatagccttcgctggcgcggttaaagcctggtttgcggaaaatccgcagggtaacgatcctcgttattatatgcgcgtcggaatggatgcgatgaaagaagttgtcagaaataaaattaatgtctgtggtagtgcgaatcgaattagtgcataatcattagttttttatgatttatcccaatgtacttcccgattaatatcggggagtgccttaatggaaaaggagataactaaaccttaataaatacatcactacaatatcgcaacaataatatatttaaaaaaattatattattcaactttatggtgaggattacacaatgaccagtccaaatattctcttaacccgtattgataaccgtctggttcacggtcaggttggcgtgacctggacatccaccatcggtgcaaatctgctggtagtcgtggatgatgttgtcgctaacgatgatattcaacagaaattaatgggtattaccgcggaaacctacggctttggcattcgtttctttactatcgaaaaaaccattaacgtcatcggcaaagctgcaccacatcagaagatcttcctgatttgccgtacgccacaaacggtacgtaaattggtagaaggtggtattgacctgaaagatgtcaacgtcggcaatatgcatttcagcgaagggaaaaagcaaatcagcagtaaagtttatgtcgatgaccaggatctcacggacttacgttttattaaacaacgtggcgtgaatgttttcattcaggacgtccctggcgatcaaaaagaacaaatccctgactaaatctaaaatcgccttaatattggtttgaggtaataaaaatgcatgaaataaccctacttcagggattatccctggcggcgttagtttttgttctggggattgatttttggctggaagccttatttttattccgcccgataatcgtttgtaccctaactggcgctattctcggtgatattcagactggcttaattaccggtggtctgacagagttggctttcgccggattaacccctgcaggtggtgttcagccgcccaacccgattatggcgggtctgatgaccaccgtcattgcatggtctacgggcgttgatgccaaaacagcaattggtcttggcctgccgtttagtttgttaatgcagtacgtcattctgttcttctattccgctttcagtttatttatgaccaaagccgataaatgcgcgaaagaggcggatacggcagcgttttcccggcttaactggacaacgatgctcatcgtcgctagtgcgtatgcggtgattgctttcctctgtacttacctggcacagggggcgatgcaggcgctggtgaaagcgatgcccgcctggctgacccacggctttgaagtggctggcggtattctgcctgccgttggttttggcttgctgctgcgcgtaatgttcaaagcgcaatatatcccttacctgatcgccggtttcctgtttgtttgctacatccaggtcagcaacctgttgccggttgccgtactgggcgcaggctttgcggtgtatgagtttttcaatgcgaaatcccggcagcaagcgcaaccgcagcccgttgccagtaaaaatgaagaagaggactacagcaatgggatctgaaatcagtaaaaaagatatcacccgtctgggctttcgtagcagcctgctgcaagcgagctttaactacgaaaggatgcaggcgggcggttttacctgggcgatgttgccgatcctgaaaaagatttataaggacgacaaaccgggcttaagcgcggcgatgaaagataacctcgaatttattaatacccacccgaatctggtcggattcctgatggggttattaattagcatggaagaaaaaggagaaaaccgcgacaccattaaaggcctcaaagtggcactgtttggcccaatcgccgggattggcgatgcgattttctggtttactttgttgccgattatggcgggaatttgcagtagttttgccagccagggaaacctgctggggccgattctatttttcgccgtttacctgcttatctttttcctgcgcgtcggctggacccacgtcggttatagtgtcggcgtgaaggcgatcgataaagtgcgagagaacagccagatgattgcccgtagcgcaaccatcctcgggatcacggtaatcggcgggctgatcgctagctatgtgcatattaacgtggtgacaagctttgccatcgacaatacccacagcgttgcgctgcagcaggatttcttcgataaagtcttcccgaacattttaccgatggcctacaccctgctgatgtattacttcctgcgggtgaaaaaagcgcatccggtgctgttaatcggcgtgacttttgtgctctctattgtttgttccgcattcggcattttgtaaatggaacgaggcactgcgtctggtggtgcctctttacttaaggaatttcatcctgtgcaaacccttcagcaagttgaaaactatacggcgttaagtgaacgtgccagcgaatatttattggccgtgatccgtagcaaaccgaatgccgtgatttgcctggcgaccggagccacgccattactgacgtatcattatctggtagaaaaaatccaccagcagcaggttgatgtcagccagctcaccttcgtgaagctcgacgaatgggtggatctgccattaacgatgccaggcacctgcgaaactttcctgcaacagcatatcgtgcagccgctggggctacgtgaagaccagctcatcagctttcgctccgaagagataaatgagacagagtgcgaacgggtaacgaacctgattgcgcgcaaaggcggtctggatttatgcgttctcggattggggaaaaacggtcatcttgggctgaacgaaccgggagaaagcctgcaaccggcctgccatatcagtcaacttgatgccagaacacagcaacatgagatgttaaaaaccgcgggtcgccccgtgactcgtgggatcaccttaggcctgaaggatattctcaatgcccgcgaagttttgttactggtgactggcgaaggaaagcaggatgcgacagatcgttttctcacggctaaagtctctaccgctatcccggctagttttttatggctgcacagtaactttatttgtttaattaacacctaaccagatgaaaaatttgctcaaaatgtttaaattaacttatgtaacagtcacgcattatattaaataacatttgactgggttgaacataacgccgatagcaaaaggagttatgttcaacaatttaattttagatatacatataacttgttctattaataaatcacctcgtattctgactcgccccctggcgcagcaaagtcaggcatttatactcttttgaatacatagaaaattgatatcaatataatgaaaatatcaaatatttgcatataaatataatcttaaagttcagtctatttaatgttcaatgaaatatttctgcctgtataatctttaaagatgttgaacatatattcacattaaatatgattatgtacttgttacaaggataaggttatatatgaataaagttacaaaaacagctattgcgggcttacttgcgcttttcgcaggtaatgccgctgcaaccgatggtgaaatagtttttgatggcgagattttaaaatccgcttgtgaaatcaatgactctgataagaaaattgaagttgctcttggtcactataatgccgaacagtttcgtaatattggcgagcgtagcccaaaaattccattcactattcctttagttaactgcccaatgactgggtgggagcacgataacggcaacgttgaagcgtctttccgtctatggctggaaacgcgagataatggcaccgtccctaacttccctaatctggcaaaagtaggctcttttgctggcatagcggcaacaggtgtgggtatccgtattgacgatgcggaaagcggaaacattatgccactgaatgctatgggcaatgataacacggtttatcagatcccggcggaatccaatggtattgtcaatgttgacctcatcgcttactacgtaagtaccgtagttccaagtgaaatcaccccaggggaagcagacgctatcgttaacgtaacgctggattaccgttaatacgttagggcgttatctgacctgtcagataacgcccttttccttcctctttctcgttgtatcaggttgaaaaataactatgagtaaacgaacattcgcggtgatattaaccttgttgtgtagcttctgtattggccaggcgcttgcaggaggaatcgttttacagcgaacgcgagtgatctatgatgccagccgcaaagaggctgcgttacctgtcgcaaacaaaggcgcagaaacgccttatttactgcaaagttgggtagataatatagatggtaaaagccgtgccccatttattataaccccaccgctatttcgtcttgaggctggcgatgacagtagtctgcgaattattaaaacagctgataacctgcctgaaaataaagagagcctgttctacattaatgttcgtgccattccagcaaagaaaaaaagtgatgatgttaatgctaacgagttgacgctggtatttaaaacacggatcaaaatgttttatcgccccgcacacctgaagggacgggtaaacgatgcgtggaaaagtctggaatttaaacgtagtgaccatagtctcaatatatataacccaactgaatattacgtcgtatttgccggactggcagtcgataaaaccgatctcacaagcaaaattgaatatatcgcgcccggagaacataaacagttaccacttcctgcatctggcggaaagaacgtgaaatgggctgcgatcaatgattatggcggcagttccgggacagaaactcgtccactgcaataaaaaatataaaaacacaggtcatcagggaatgccacaacgacaccaccagggacataaacgcacaccgaaacagttggcgctcatcatcaaacgttgtttgccgatggtgctcactggcagcggcatgctttgcactaccgctaacgccgaagagtattatttcgaccccattatgctggaaaccacaaaaagtggtatgcaaacaaccgatctgagccgttttagtaaaaaatatgcacaactaccaggaacttatcaggttgatatctggctgaataaaaagaaggttagtcagaaaaaaattacatttaccgccaatgcagagcaacttctgcagccacagtttacggtagaacaactacgtgagctgggtattaaggtggatgaaatcccggcgctggctgaaaaagatgacgatagcgtgatcaacagccttgaacaaatcattcccggtacagctgctgaatttgatttcaatcatcagcaacttaatttgagcattccccaaattgcactgtaccgtgatgcaagaggttacgtctccccttctcgttgggacgatggtataccaacgctgtttaccaactacagctttacaggttctgataaccgttaccgccagggcaatcgtagccaacgacagtacctgaatatgcaaaatggtgctaattttggcccctggcgattacgcaactattccacatggacacgcaacgatcagacaagtagctggaataccatcagtagttatttacaacgtgatatcaaggcgttgaagtctcagttgcttctgggagaaagcgccaccagcggcagtattttttccagctacacctttactggcgtgcaactcgcttccgacgataatatgttgccaaacagccagcgcggatttgccccaacggtacgcggtatcgcaaacagtagtgcaatcgtgactatcaggcaaaatggttatgtgatctatcaaagcaacgtgagtgcgggtgcctttgaaattaacgatctctacccctcttccaacagcggcgatttagaagtcacgattgaagaaagtgacggtacacaacgtcgctttatccagccttattctagtttacccatgatgcagcgacctgggcatctaaagtatagcgcgaccgctggacgctatcgcgctgatgcaaacagtgatagcaaggaacccgaatttgctgaagccacggcaatatatggtttgaataatacttttacgctgtatggcggcctgctcggttctgaagattattatgcgctggggatcggtatcggcggcacacttggcgcactgggcgcgttgagcatggatatcaacagagctgacacccaattcgataaccagcactcttttcatggctatcaatggcgtacgcagtacatcaaagatatcccggaaaccaacaccaatatcgctgtcagctactatcgctataccaacgatggctattttagttttaatgaagccaatacccgcaattgggactataacagtcgccaaaaaagtgaaattcaattcaacatcagccagacaatatttgatggggtaagtctgtatgcctccggtagccagcaagactattggggcaataacgataaaaacaggaatatctctgttggggtttccggccagcaatggggagttggttacagcctgaattatcaatacagccgctacactgatcaaaataatgaccgcgcactctctttgaatctcagtattccgttagaacgctggttaccgcgtagccgggtttcctatcagatgaccagccagaaagatcgcccaacccaacatgaaatgcgtcttgatggcagtctgctggatgatggtcgcctgagctatagcctggaacaaagtctggatgacgataacaaccataacagtagcctgaacgccagttaccgtagtccttatggcaccttcagtgccggatacagctacggtaatgacagcagccaatacaattacggcgttaccggcggcgtggttatccatcctcatggcgtgacgctcagccaatatctgggcaacgcttttgcgcttatcgatgctaacggagcatctggcgtgaggatacaaaactatccggggattgctaccgatccttttggctatgcagtggttccttatctcacaacttatcaggaaaaccgtctcagcgtagatactacgcagctgcccgataacgtcgatcttgaacaaacaacacagtttgtggtgcccaacagaggtgcaatggtagcggcgcgtttcaacgccaatatcggttatcgcgtacttgttacagtcagcgatcgcaacggtaaaccgttgccctttggcgctcttgccagcaacgatgatacggggcaacaaagtatcgtcgatgagggcggcatactatatctctctgggataagcagtaaaagtcaaagctggactgtacgctggggaaatcaggcagatcaacaatgtcagtttgctttcagtacaccggatagtgaacctacaacctctgtattacaaggcacagcgcagtgccattaaggataaaaaaatgaaaagagcgcctcttataacaggtcttttgttgatatccacatcctgcgcttatgcctccagtggagggtgtggagccgacagcactagcggtgcgacaaattacagcagtgtggttgatgatgttacggtgaaccagacagataacgtgacaggacgggagtttacctctgcaacgctaagtagcactaactggcaatacgcctgttcctgctctgcgggtaaggcagttaaacttgtctatatggtcagccccgtacttaccaccactggacatcagacaggatattacaaactcaatgacagcctggatattaaaaccacattacaggcaaacgacattccaggactcacaaccgaccaggttgtctctgttaacacccgattcacacagataaaaaacaacacggtatattctgctgcaacccaaacgggtgtttgccagggtgatacgtctcgttatggacccgttaatattggtgcgaacaccacctttaccctgtatgtcaccaagccatttctcggcagcatgaccattccgaaaacggatattgccgtcattaaaggcgcgtgggtcgatggaatgggaagcccgtctacaggtgacttccatgatttagtcaagttaagcattcagggaaatctcaccgccccacagagctgcaaaattaatcagggcgatgttattaaggttaattttggattcatcaatggtcagaagtttaccacccgcaatgccatgccagacggttttactccagtagactttgatatcacttatgactgtggtgatactagtaagattaaaaacagcttgcaaatgcgcatcgacggtacaactggggtagtagaccagtacaacctggtcgccaggcgaagaagtagtgacaatgtgcccgatgtcggtattcgtattgaaaatctcggcggcggagttgcaaatattccttttcagaacggtatccttcccgttgatccttccgggcatggcaccgtcaatatgcgcgcctggccagttaatctggtcggtggtgagctggaaacaggaaaatttcagggcacagccaccattaccgtcatcgtgcggtaaaagaagacgttgcgttttgattaacgcaacgcttcggcactgttacccctgctgctccagcgcatacttatacagcgcatttttcttcacgccgtgaatttctgcggccagcgccgccgcttttttcagcggcagttctgcctgtagcagcgccagcgtgcgcagggcatcggcgggtaagtcttcttcctgtgctttatgaccttcgacaatcagcaccatttcgcctttgcgacggttttcatcttcctttacccacgccagcagctcgccaacgggcgcgccgtgaatggtttcccaggttttggtcagctcacgcgccagaaccacgtagcgggattcgcctaataccgcaacgatatcttccaggctatctaacagacggtgggtagattcataaaaaatcagcgtgcgcggctccgcttcaatggcttttagcgcatcacggcggcctttacttttggcaggtaaaaagccttcgtaacagaaacggtcagagggtaaacccgctgcgcttaacgcagtgatagcagcacacggcccgggtagcggcaccacgcggatccccgcttcacggcaggtacgcaccagatggtagccaggatcgttaattagcggcgttccggcatcggaaaccagcgcaatgttttgcccctcttgcagcttcgccagcagcgtttcagctttttgttgttcgttatggtcgtgcagcgcaaacaaccgggcattaatcccaaaatgttgcagcaataaaccggtgtgacgagtatcctcggcggcaatcagatcaacggcctgtaatacctctaacgcacgctgggtgatatccgccagattgccgattggcgtcggtacaatgtaaagctggccctgagaattatccgcgctttggtgttgtttcattgtgtcgtccgtattgccgatttaatattgagcattgcgtaaaaaaaatatcactggatacattatggtacccagtacattttctcgtttgaaagccgcgcgttgtctgcctgttgttctggcagccctgattttcgccggttgtggcacccatactcccgatcagtccactgcttatatgcagggcacggcgcaggctgattctgccttttatcttcagcagatgcagcaaagctctgatgataccaggatcaactggcaattactcgccattcgtgcactggtgaaagaaggtaaaaccgggcaggcggttgagttgtttaaccaactaccgcaagaactgaacgatgctcagcgtcgcgagaaaacactgctggcggtagagattaaactggcgcagaaagattttgctggcgcgcaaaacttgctggcgaaaatcacacctgccgatttagaacaaaaccagcaagcgcgttactggcaggcaaaaatcgatgccagccaggggcgtccttccattgatttactgcgcgcgttaattgctcaggaaccgctgcttggcgcgaaagaaaaacagcagaatattgatgccacctggcaggcgctctcctccatgactcaggaacaggcgaatacgctggtgatcaacgccgacgaaaatattctgcaaggctggctggatctgcagcgcgtctggtttgataaccgtaacgatcccgacatgatgaaagccgggatcgccgactggcagaaacgttatccgaacaatccgggcgcgaaaatgctgccaacgcagttggttaacgtaaaagcgtttaaaccagccagcaccaacaaaatcgccctgctgttgccactgaatggccaggcagcggtatttggtcgcactattcagcaaggctttgaagcggcgaaaaatatcggcactcagccagtggcagctcaggtagctgccgcacctgccgcagacgtagctgaacaacctcagccgcaaaccgtggatggcgttgccagcccggcacaagccagcgttagcgatctgaccggtgaacagcctgcagcccagccggtgcctgtaagcgccccggcgacaagcaccgcagcggtaagcgcacccgcaaatccatccgcagagctgaaaatctacgataccagtagtcaaccacttagccagatcttaagccaggttcagcaggatggcgcgagtattgtggtcggtccgttgctgaaaaataacgttgaagagttgctgaagagcaacactccgctgaacgtactggcactgaaccagccggagaatatcgaaaatcgcgtcaatatttgttacttcgcgcttagtccggaagacgaagcgcgcgatgcagcgcgtcatattcgtgaccagggtaaacaagcgccgctggtgctgatcccacgcagtagtttgggcgatcgcgtagccaatgcgtttgcgcaagagtggcagaaactgggcggcggcaccgttctgcaacaaaaatttggttccaccagcgaattacgcgcgggtgttaacggcggttctggtattgctttaacgggtagcccgattactctcagagcgacaaccgactccggcatgacgaccaacaatccaacgctgcaaaccacgccaaccgatgaccagttcaccaataatggcggtcgtgtcgatgcggtgtacattgtggcaacgccgggtgaaatcgcttttatcaaaccgatgatcgccatgcgtaacggtagccagagcggtgcaacgctgtacgccagctcccgcagtgcgcaagggaccgctggcccggatttccgactggagatggaaggcttgcagtacagcgaaatcccgatgctggcaggcggtaatctaccgttaatgcagcaggcactcagcgcggtgaataacgattatagtctggctcgcatgtatgcgatgggcgtcgatgcctggagcctggcaaatcatttcagtcaaatgcgccaggttcagggttttgaaatcaacggtaataccggaagcctgacggctaacccggattgcgtgattaacaggaacttaagttggctacagtaccaacaaggtcaggtagtccccgtcagttaaattaagtgattaacaggaacttatcatggctacagtaccaacaaggagtggtagtccccgtcagttaaccaccaaacagaccggcgatgcgtgggaagcacaagcgcgtcgctggctggaaggcaaaggactgcggtttatcgccgctaacgtgaacgagcgtggcggcgagatcgatctgataatgcgtgaaggccggaccaccatttttgtcgaggtacgctatcgccgctctgcgctttatggcggcgcggcagccagtgtgacccgcagcaaacaacacaaattattacagactgcccgcttgtggctcgcgcgtcataatgggagttttgatactgtggattgccggttcgatgtggtagccttcaccgggaatgaggttgagtggattaaggatgcctttaatgaccacagttaattaaggtttaaggattagcgtgcaagaaagaattaaagcttgcttcactgaaagcattcaaactcaaattgcggcggcagaggcgcttccggatgccatctcccgtgcagccatgacgctggttcagtctctgctcaatggcaacaaaatcctctgttgtggtaatggaacttccgctgccaatgcacagcattttgctgccagcatgatcaaccgtttcgaaacggagcggcccagcttacctgccattgcactaaatactgataatgttgtcttaacggcgattgccaacgatcgcttacatgatgaagtgtatgcaaaacaggtgcgggcgctgggtcatgcgggagatgtattgttagccatttccacccgtggcaacagccgcgatattgttaaagcagttgaagccgccgttacgcgtgatatgaccattgtggcattgaccggctatgacggcggcgaacttgcaggtttgttagggccacaggatgtggagatccgcattcctagccatcgtagtgctcgcattcaggaaatgcatatgctgacggtaaattgcctgtgcgatctgatcgataacacgcttttccctcaccaggatgattaaggagaatacatgaaggcattaagcccaatcgcagtccttatttccgcgctgctgttgcaaggttgtgttgccgctgccgtagtgggtaccgctgctgtgggtaccaaagccgcaactgacccacgcagtgtcggcacccaggtggacgatggtaccctggaagtgcgcgtgaacagcgcattgagcaaagacgaacagattaagaaagaagcgcgcattaatgtaacggcctatcagggcaaagtgctgctggttgggcagagtccaaatgctgaacttagcgctcgcgccaaacagattgctatgggcgtagacggtgccaacgaagtgtataacgagattcgtcagggccagccgattggtctgggcgaagcatctaacgatacgtggatcaccaccaaagtgcgtagccagctcttaaccagcgacctggtgaaaagctccaacgtgaaagtgaccaccgaaaacggtgaagtgttcctgatggggctggtgactgaacgtgaagcgaaagcggcggcagatattgccagccgggtgagcggcgtgaagcgggtaactacggcgtttacgtttattaaataacagccccttgtaatgcctgatgcgacgcttgccgcgtcttatcaggcctacaacgatacaaaccgtaggtcagataaggcgtttacgccgcatccgacatgttttccctcaaatcagaacaacagcgccagcccgccgacaatcacaccagacactgccaccatcgcccctgtcagccataaggctttcgccgggaacgctttgcgcagcataatcagactcggcaaactcactgccgggagcgtcatcaacaatgccagcgccggagcggttcccatacctgccagcatcatcgtttgtacaatcggaatttctgctgccgtgggaatgacaaacaagcatcctgctaccgccatcgccaccacccacatcaggctgttatcgacagcaccatcggcatgggggaataaccagacgcgagcggcacccaacaccagtactgcaaggatgtaaaccgggatcgtactccagaaaagcgtccatagcgccctgccccagcggctaaaaaacccgccctgtgcttccggtatgtcaatttcgaccggtgcctgcgtttgcggtgtttcacgcacccatttttgcaccagcgtcgcaatcagcaacaccatcaccagcccggccaccagacgaatcgccgcaaaaccccagccgaggacaaagcccataaacaccagcgtcgccgggtttaacaccggattgcccatccagaatgccagcgcaccgcccatgctcacctgttggcgacgcattcccgccgcgaccggagccgcacagcaggtacacatcatgcccggcaagctaaacagcgttcccagcagcgtgccgcgaaagcggctttgcccaagcgtacgcaacaaccagtcacgcgggatcagcacctgaatcaagctaccgaggatcacccccagcaccgccgctttccataccgcgaggaaatagatcatcgcgtaatccaacgccgcctgccatgggttagcatccgcctgcgcaaggatagatttaccgatactgtgggtttcggcagcagtaaacgctttgccgtagtaaggttcccatttcacataccagagaccggcaatgacaacgagaaagaaaagcgcgggtttccaccactgaatgggcgttgccgcctgagaactagactgaccagtcatagcattccccaggaataagttatgataattgagcgcgtgaatattacgctcactatcaattcttgggaataattattcagctcttttgcgtaattcactagagcttaaaatcgtcacgccttcatgctcaggccgcatgctctctgccagcatgacccgcgccacgtctctcgcatcaatggatttccagttacctggtaacaaacggaacagcggcgcaaaaagcgtttcgttcatccgctgtttgctacgatcgcccagtaacatgctcgggcgagcaatggtcaatttcggccagttctgggcgattaatgcttcttccatctcccctttgacgcggttatagaaaaacgggctgtgggcattggcacccatcgcactgactaccaacatatgctgcgcgcccagtcgccgcccggttaatgcggtatccactaccagcgtgtaatcggcatgaataaacgcctctttgctccccgcttctcgccgcgtggtgccgagacaacaaaacacaatgtcgatgggatcggtgacctgcgccaacgcgtcactcagttgcggatcatggggattaaacaccccgggcatatcgcccaacggacgtcgcgtcggcgcagcaatggcgttaactttcggttcgttaatcaacatccgcagcaggtgaccgcccaccagccccgttgcgcctgtaatcagtacctgactcatcttcgctcctttacagaattgtctgccttgcgctccacggctcatgcaccaggcttaatagaccatgaggtaattatccccgattgtgggaaattcgcctcatccaatgcaacaacgcggaggaagcatgagtaagaaaattgccgttttaatcactgatgaatttgaggatagtgaatttactagtcccgcagacgagttccgtaaagccggacacgaagtgattaccattgaaaaacaagcgggtaaaacggtgaaaggcaaaaaaggagaagccagcgtgaccatcgataaatccatcgatgaagtgacgcctgcggagtttgatgccctgctgctaccgggcggccatagtccggattatctgcgtggggacaaccgttttgtcacctttacccgtgattttgtgaatagtggcaaaccggtgtttgccatctgtcacggcccgcagttgctgatcagcgccgatgtgattcgggggcgcaaactgaccgcagttaaaccgatcattattgatgttaaaaatgcgggcgcggaattttacgatcaggaagtcgtggttgataaagatcagctggttaccagccggacaccggacgatctgccagcgtttaaccgcgaggcgttacgcctgctcggtgcctgattacgcctgctcggtgccactgtcgcgtagccaaatcatttttttaccaaagcccagcgtgttgtcggtgaatttgatttcatcgagccggatttcccacaccggggcgctcagcattctggcaaccggaaagcgacgattgtacgccttgcgcgcgaggtcgctttcctcaccttccagcctgcggatctcacctttaaactgcacaccgcgaattaacgctaccgttttcggctgaccgtttaccgttccggcaaccgcagcctgcggcccactcatctgcgcgtggcgcgttttttcttccgtcaaaatgtagaaggcgactttctgcgcatcaaaaagataaaaggcattagcgcaccagagttccccttcctgctgcacacaccaagtgacaacatgttgttttgccagccaacggctgatggcgatgagtgtttccattgctgttctcttttatactgtgggcctgaccttaacatgcgacgcagacgatgacaccctggtttctttacttgatccgtaccgccgacaataagctttataccgggatcaccacggatgtcgaacgccgctatcagcagcaccaaagcggcaaaggggcgaaagcactgcgcgggaaaggagaactaacgctggtgttttccgcgccagtgggcgatcgtagcctggcgttacgggcggaatatcgcgttaagcaactgaccaaacggcaaaaagagcgtctggtagcggaaggcgcagggtttgcagagctgttaagcagtctgcaaaccccggagattaaaagcgattgaaatgctcgtgatactcaaccaggccggtaacgccattcagcgcgtcatccgctaaacgatgtacctggaaggcgctttcagtgcccggccagcggcaacgcagatcgtgatgcgccgccagttcaaagccgaaacgactgtacagcgccggatcgcccagcgtcaccactgcggcatagccgaactcattaaggctatcgagtccttcatagaccagttggcgtgccagcccctgtccacggtatttttcatcaaccgccaacggtgccatgccgacccattgcaggtcttcgccctgcacatcaaccggactaaatgccacatagccaatgacctgaccttcgtcatctgtcgccaccagccccagcgtcagaaagccatcttcacgcagatcgtgaaccagcttcgcttccgcatcactttcgaaactgcgacgcagcagggcatcaatacccggcgcatcaatgggaatttctactcgaattagcatggttcacctacgcttgtctgtttggtttcaggcgcggttttcattcccgcctcaacaaaatccgccagttgcagcagcatcatgcgtaaggctttcggcatttgctccagttcaatggcgtccatcaggtttttcacatacagccccagctccgtatcgccttcaatcaccagccgacgctggaagaagagcgtatccggatcttgtttacgcgccgcaatcatcagcagatcgctggcgtcggcactaaaactcacatcagcttgcgcgttctggctaacgaccagtttgccattcaccacgctggtaaaccattgcaggtcaatatcacgcacatgaatacttaaccagcggccttcaagaaactccagctcgccatcatccagcgcctggcggaattgccagcttaagacctgctcaagaacctggcgttttagcgcaaatggcgtcagttttaccggtacactcaacagagatggccccaaatgcacaatacgggaacgcagtttatccaacacgagttttactccctgtttcaacaatcatcctattttgccatatcagaaaaataacatagcggtataaatcaacaattccatatgaaattgctgctaccaccaatacaactttaactgccttaaatcaaaaattgtcgcagcaaggttaactaaaatcccagttcgttaacatttttgcgttttgatagcgcaaccttcaggaaaaattatggagctgctctgccctgccggaaatctcccggcgcttaaggcggccatcgaaaacggcgcagatgctgtttatatcgggctaaaagatgataccaatgcccgtcacttcgccggccttaactttaccgagaaaaaattgcaggaagcggtgagttttgtccatcaacatcgccgcaaacttcacatcgcgattaacacttttgcgcatccggacggttacgcccgttggcagcgcgccgtggatatggcggcgcagctgggtgccgacgcgctgatcctcgccgacctcgccatgctggagtacgccgccgagcgttatccgcatattgagcgccacgtaagcgtgcaggctagcgcgaccaatgaagaggcgattaacttttatcatcgccattttgacgttgctcgcgtggtgctgccgcgcgtgttgagcattcatcaggtgaaacaactggcacgggtcacacctgtaccactggaagtctttgctttcggcagcctgtgcattatgagcgaaggtcgttgctatctgagcagctatctgacgggtgagagccccaacaccataggcgcgtgttctccggcccgtttcgtgcgctggcaacaaacgccgcaggggctggaatcccgcctgaacgaagtgctgatcgaccgttatcaggacggcgaaaacgcaggttatccgacgctatgtaaagggcgttatctggtggacggcgagcgctatcacgcgctggaagaaccaaccagtctcaataccctggaactgctgccggagttaatggcggcgaatattgctagcgtgaaaattgaaggccgccagcgtagcccggcgtatgtcagccaggtggcgaaagtctggcgtcaggctatcgaccgttgtaaggccgatccgcaaaactttgtaccgcaaagcgcgtggatggagacgctcgggagcatgtccgaaggcacgcaaaccactcttggcgcatatcaccgtaaatggcagtgagaaaagcaatgaaatattccttagggccagtgctgtggtactggccaaaagagacgctggaagaattttatcagcaggccgccaccagcagcgccgacgtgatttatcttggtgaagcggtatgcagcaagcgtcgggcaaccaaagttggcgactggctggagatggcaaaaagcctcgccgggagtggtaagcagattgtgctctccacgctggcgctggtgcaggcaagttctgaactgggcgaactgaaacgctatgttgagaacggtgagtttctgattgaagccagcgatctcggcgtggtgaatatgtgcgctgaacgcaaactgccgttcgtcgccgggcacgcgctgaactgctacaacgcggtgacactgaaaatattgctcaaacagggcatgatgcgctggtgtatgccagtggagctttcccgcgactggctggtgaatctgcttaatcagtgcgatgagctgggcattcgtaaccagtttgaagtggaagtcctgagctacggtcatctgccgctggcctactccgcccgctgctttaccgcgcgtagcgaagaccgcccgaaagatgagtgtgaaacctgctgcattaagtatccgaacgggcgcaacgtgctgagccaggaaaaccaacaagtgtttgtactcaatggcattcagaccatgagcggctacgtttacaacctcggtaacgagctggcatccatgcagggcctggttgatgtggtccgcctgagtccgcagggtactgacactttcgcgatgctcgacgccttccgcgctaatgaaaatggcgctgcaccactgccgttgacggcgaacagcgactgtaacggctactggcggcggctggcaggactggagctgcaagcctaagtaaatagctcactttgttaacaactttaactactctttaatgcagtattaaagattaatcggtaacaaagtgagctgttatgactgataaaaccattgcgtttagcctactcgatctggcccccattcccgaaggttctagtgcgcgagaagcattctcccactctctcgatctcgcccgtctggctgaaaagcgcggctatcatcgctactggctggcagaacaccacaatatgactggcattgccagtgctgccacgagcgtattgatcggctatctggcggcgaataccaccacgctgcatctggggtctggcggcgtgatgttgcctaaccacagtccgttggtcattgcagaacagttcggcacgcttaatacactctatccggggcgaatcgatttggggctgggtcgtgctccgggtagtgaccaacggacaatgatggcgctacgtcgtcatatgagcggcgatattgataatttcccccgcgatgtggcggagctggtggactggtttgacgcccgcgatcccaatccgcatgtgcgcccggtaccaggctatggcgagaaaatccccgtgtggttgttaggctccagcctttacagcgcgcaactggcggcgcagcttggtctgccgtttgcgtttgccagtcacttcgcgccggatatgctgttccaggcgctgcatctttatcgcagcaacttcaaaccgagtgcacggctggaaaaaccatacgcgatggtgtgcatcaatattatcgccgccgacagcaaccgcgacgctgaatttctgtttaccagtatgcagcaagcctttgtgaagctgcgccgtggcgaaaccgggcaactgccgccgccgattcaaaatatggatcagttctggagtccgtctgagcagtatggcgtgcagcaggcgctgagtatgagcttggtaggtgataaagcgaaagtgcgtcatggcttgcagagcatcctgcgcgaaaccgacgccgatgagattatggtcaacgggcagattttcgaccaccaggcgcggctgcatagctttgagctggcgatggatgttaaggaagagttgttgggataatgtgtcttaacgcgggaagccttatccgagctggcaacgctgtcctacatagacctgataagcgaagcgcatcaggcattgtgtaggcagcagaaatgtcggataaggcaccgctgattactgatacaccggcagtaaattaaagctgcttaaaatatgcaccagtgcgttgccgacgccaaacaccagaatcagcgcaatcatcggcttgccaccccagacgcggaatttcgggctgccaaagcgtttacggcttgcacgggctaacagcgccggaacaattgccgcccagatggtagccgctaaaccagcataaccaatggcgtacaggaatccgttcgggaacaacagcccccccacaactggcggggcaaaggtcagcaatgccgttttcaagcggcccacagcgctgtcgtcgaaaccaaacagatctgccagatagtcaaacaaacccagcgttacgccgaggaagctactcgctaccgcaaagttactgaacacgaccagcagcagatccagactacggctgttcagtacgccgcttaacgcctgtaccagcacatcaatattaccgcccttctctgcaataccgataaactccggacgcgggatgttacccatcgtcgccagcaaccagatggtatacagcgccagcgccatcagcgtaccgtacaccagatatttcacgatggttttcggatctttgccgtaatacttcatcaggcttggcacgttaccgtgataaccaaagcttgccagacagaacggcagggtcatcaacagatacggtgcataagacgcattgctttcggcgacgttgaacaatgtcgcaggctgcacatgccccagcaggctaccaaaggtgaggaagaaggtaatgactttcgcccccagcacaatcgctgtcatgcgactgacggctttagtgctcaaccacaccacaaacgctaccagcaatgcaaaaccaaaacccgccgcccgtgccgggacgtttagactcatctctgcgaaggtgtgatgcagaatgctaccactggcagaaatataggcataggtcaggatatagagcacaaaggcaatggaaatgccgttgaccacgttccagcctttgcccagcaaatctttggtgatggtgtcaaaactgctaccgattctgtaattcaggttagcttccagaatcatcaagccggaatgcagcatacagaaccaggtaaagatcagcgccgccatactccagaaaaaccacgccccggacatgaccactggcagagaaaacatccctgcgccaataatggtgccgccgataatcaccacgccgccaagcaggctcggactcgtttgggtggtggttagtgttgccatgagggcttctctccagtgaaaaatagtgcgactgcgttgttatgcattgcactgtaccagtacacgagtacaaaagacagaaaaaaagccccgatggtaaaaatcggggctgtatatattattttacagattgtgttcgctgttcagcgatgattacgcatcaccaccgaaacgacgacgaccggtagaatcatcacgacgcggagcgcggccttcacgacgttcgccgctaaaacgacgaccatcaccacggccaccttcacggcgttcaccgctgaagttacgaccgccttcacgacgttcgccaccgaaaccacgaccaccgccacgacgctcaccgccagtatgcggctgtgcatcgcccagtaactgcatgttcatcggcttgttgagaatgcgagtgcgcgtaaagtgttgcagcacttcacccggcatacctttcggcagttcgatggtggagtgagaagcaaacagcttgatgttaccaatgtaacggctgctgatgtcgccttcgttagcaatcgcaccaacgatatgacgaacttcaacaccatcatcgcggcccacttcaatgcggtacagctgcatatcgccaacatcacgacgttcacgacgcggacgatcttcacggtcaccacgcgggccacggtcgttacgatcgcgcggaccacggtcatcacggtcacggaattcacgtttcggacgcatcggcgcatctggcggtacgatcagagtacgttcaccctgtgccattttcagcagtgccgcagccagagtttcgagatccagctcttcaccttcagcagtcggctgaattttgctcagcagtgcgcggtattgatccagatcgctgctttccagctgctgctgtactttagcggcgaatttttccagacggcgtttgcctagcagttctgcgttcggcagttctacttccggaatagtcagcttcatagtacgttcaatgttgcgcagcagacgacgctcgcggttctcaacgaacagcagcgcgcggccagcacgacccgcacgaccggtacgaccgatacggtgaacgtaagactcagaatccatcgggatatcgtagttaactaccaggctgatacgctcaacgtccaggccacgggctgcaacgtcggtcgcaatcaggatgtccagacgaccatctttcaggcgttccagtgtctgttcacgcagcgcctggttcatgtcaccgttcagcgcggcgctgttgtagccgttacgctcaagagcttcagccacttccagagtcgcgtttttggtacgaacgaagataatcgccgcatcaaaatcttccgcttccaggaaacgtaccagtgcttcgtttttgcgcataccccagacagtccagtagctctggctgatgtcaggacgggtagtcacgctggactgaatgcgcacttcctgcggctctttcataaagcggcgggtaatgcgacgaatcgcttccggcatggttgcagagaacagagcggtctgatgaccttccgggatctgcgccataatggtttcaacgtcttcgatgaagcccatgcgcagcatttcgtcagcttcatccagaaccagaccgctcagtttagagaggtccagagtgccacgtttcaggtggtccagcagacggcccggagtaccgacaacgatctgcggcccctgacgcagggcgcgtaattgcacgtcataacgctggccgccgtacagagcaaccacatttacgccgcgcatgtgtttagagaaatccgtcattgcttcagcaacctgtaccgccagttcgcgggtcggtgccagcaccagaatctgtggtgctttcagctcaggatcaagattctgcaacagaggtaaagagaatgctgcagtttttccgctccccgtctgggccatacccagaacgtcgcggccattcagcagatgtggaatacactctgcctgaattggagatggtttttcgtaacccagatcgttaagggcttcaaggataggagccttcaggcccagatctgcaaaagtggtttcgaattcagccatgtagtacgtgtgcctcaaaattaatggcggccagtctacataactcatcatgaaattgatcagcaattttcattgaaaagtgtgaaccggctcaaagtaggtgtattaacgaacaacaacgccctcacccgttaaggtgatggcaatcaaaaaagattacgggctgatgtgtacgtcagttattgctggtcgctttctgccaggtcatcttggtcctggcccaggaggcttaattccaacaatgcgtatcggtgctcaacaaagttatgaacgttgttggcaaccgccagtttgaacagtgccgtggcgctgtccaaatcccccagacttaggtagtacttacctaaatagaagttggtttcactgagatgctcagcgaggctggtgttatccgttgcgtccgccttgagcctttccattaacgtttgttcgctaatgttgcccaggtagaactcgacaatgttccatccccactgttccttatcgcttttttcgaagtgctgtttcaacacttctttagcctgcttctcatcgagcttctgctcggcgagataaagccacagactacggaaaggatcattgggatcgtcttgataaaacgccagcagatcatcttgcgctaacttgtcacgaccgccgtaatataatgcgatcccgcgattcaagtgcgcgtagttgtaagttggatcaagctcaagtacagaatcaaacgcttcataggcagcatcaaaattgcctgcctgcgttaaatatatgcctaagtaattgaatacttcaggcatatccggtcggattgccagcgcttggctaaaatcgttacgcgctaatgccctcagaccgagactatcatacaacactccgcgctcatataaaagctgtgcgcgttcgtcatcggttaaagcccgactggcaaggatttgttccatacgtgccagaatcacttcctgctgtaaagtcggttgcaatggtaccgcgaggacttcacttttacgccaggaagtattactgcatcctgcaagcgtaagtgctgtcgcaacgaaacaccagcgcaaaaaaggcttcatttcccactcccgaagaccacggttgaatgaacgtcctgttcccggttgctaacaaggcgtcctgcccggttaaaagccccccgccgcagcggagggcaaatggcaaccttactcgccctgttcagcagccggagcttccggtgctgcagcaggttgagactgctcagtcgcttctttaatgctcagacggatacggccctggcgatcaacttccagaactttcaccggtacttcctgacccatctgcaggtaatcggtcactttctcaacgcgtttgtcagcgatttgagagatgtggaccagaccttctttaccgccgccgatggcaacaaatgcgccaaagtcaacgatacgggtcactttaccagtgtagacgcggcccacttcgatttctgcagtgatctcttcgatacgacgaatagcatgtttcgctttctcgccgtcggtcgctgcaatcttcacagtaccgtcatcttcgatttcgatggtggtgccagtttcttcggtcagagcacggattacagaaccgcctttaccgataacatctttgatcttgtccgggttgatcttgatggtatggatacgcggtgcgaactcagagatatcgccacgcggcgcgttgatcgcctgttccattacgcccaggatatgcagacgcgcacctttagcctggttcagcgcaacctgcatgatctctttggtgataccttcaattttgatatccatctgcagtgcagagataccgtcgcgggaacctgcaactttgaagtccatatcgcccaggtgatcttcgtcgcccaaaatgtcagacagtacaacgtagttgtcgccttctttcaccagacccattgcgatacccgcaacggcagctttgatcggcacacctgcgtccatcagcgccagagacgcgccgcacacggaagccatagaagaggaaccgttggattcagtgatttcagacacaacacgtacggtgtacgggaatttgtccatatccggcatgactgccagcacgccgcgcttcgccagacgaccgtgaccaatttcacgacgcttcggagaaccgaccatgccggtttcgcctacggagtacggagggaagttgtagtggaacaggaaggtatcggtacgttcgcccatcagttcatcaagaacctgcgcgtcacgagcagtacccagcgttgcggtaaccagcgcctgcgtttcaccacgggtgaacagcgcagaaccgtgagtacgcggcagcacgccagtacgcacatccagaccacggatcatatctttttcacgaccgtcgatacgcggttcgcctgccagtacgcggctacgaacaacgtttttctcgatcgcgtgcagaatttcacccagttcgttttcgtccagggtttcgtcttcagcaagcagcgtcgcgatggtttcagatttgatgacatcaacctgcgcataacgctcttgtttgtcggtgatgcggtaagcatcgctcaggcgagcttcagccagtgcagcaacgcgcgcgtttagcgcttcgtttaccggctccggctgccagtcccaacgcggtttaccggcttctttcaccagttcattgatgttctgaataacaacctgctgttgttcatgaccgaacactactgcgcccagcatctggtcttcgctcagcagttgagcttcagattcaaccatcagtacagcggcttcagtaccggcaacaaccagatccagtttgctctctttcagctcgtcctgagtcgggttcagtacgtactggtcattgatgtaacctacgcgggcagcaccaatcgggccattgaacggaataccagacagagacagcgctgcggaagcaccaatcatcgcgacgatatccgggttaacttgcgggttaacagaaaccacggtggcgataacctgaacttcgttgacgaagccttccgggaacagcgggcgaatcgggcggtcaatcagacgcgcgatcagggtttcgccttcgcttgggcggccttcacgacggaagaagctacccgggatacgaccagcagcgtaggtacgctcctgatagttaacggtcagtgggaagaagtcctgacctggtttggcttttttctggccaacaacggtaacgaataccgcggtgtcatccatgctaaccataacagcggcagtagcctgacgagccatcatgccggtttccagagtcacggtgtgttggccgtactggaatttacgaacgatcggattaagcaatgtaatatcctttctctttcttagacagtaccttacggcactggtgttaataccgcttcttctgcgcatcctcgcgactaatgacaaccctaacccagctctatgtgggtaaagcctctcattagccgcgcgaacctctgcaacggaagatcattcatagcaacaatacattagtttccagtgaattgctgccgtcagcttgaaaaaaggggccactcaggcccccttttctgaaactcgcaagaattagcgacgcagacccaggcgctcgatgagctgggtgtaacgtgctacgtctttacgtttcaggtagtcgagcagtttacgacgctgagaaaccatgcgcagcagaccacgacggctgtggtgatcttttttgtgctctgcaaagtggccctgcaggtggttgatctgtgcagtcagcagtgctacctgaacttcggtagaaccggtgtcgtttgcgtcacgaccaaactcagaaacgattttagctgttgcttcagtacttagagacattttaaaactccaaagtatatagaatgaaaggacgccgatctctaattcagcgatcccagtgtacgttacgcaaagtgttaaacaatttacgcgacgttaagcggcagtattctactcgtagcgacctgttatcgcaagacggttaacattacgccgggtattcaaccaccaggcgacgaggcgcaacgcggccttcatcgtcaatttcgcccataccgataaatttgccgttctcaccttccgtgacgcgaaccagtccttccagtggcgcaccagatgtacgaaccgggttaccatttttgaagtaaacagaagacgttaacggaagattcaccaccggatagtcgctagctggactgtccattggcatcagtaatggatcaagtaactccgcggctggaatatcctgctgttcagcttgctcaacaagttcacgcaggtgctccagggtcaccatccgttcaaccggatatttacttaccgccagacggcgcaggtaaataacatgcgcgccacagccgagtttttcacccaggtcatcaatgatggtgcggatataagtgcctttactgcagtgaatttccagctccagctcattgccttcatggcgaataaacagcaattcataaacggtaatcggacgcgcttcacgcggaacttcaatgccctgacgcgcatattcgtacagttttttgccctgatatttcagtgcactatacatgctagggatctgttcgatatcgccacggaaagtatccagtgccgctgccagctgctctgcgctaaaggttaccggacgttcttcaacgatctgtccgtcggcatcagaagtatcggtacgctgtccaagacgcgcaatgacccgatagcgtttgtcggagtccagcagatactgggaaaacttcgtcgcttccccgaggcaaatcggcaacatgccggtcgccagcgggtccagcgcaccggtatgcccggcacggttggcgttatatatacgtttcactttttgcagcgcatcgttgctggacataccctgaggtttatccagcaacaaaacgccgttaatgtcgcgaccgcgacgacgaggacgactcattagtcctccttgctgtcgtccgggttaacacgacgttcttcgtcatgtttgaccacgctggtcaccaggttactcatgcgcatcccttcaaccagagagttgtcgtagaagaaggtcagttccggcacgatacgcaggcgcatcgctttccccagcaggctgcggatgaaaccagaagcttcttgcaacgctttgatgcccgctttaaccgcgtcttcatctttgtcgttgaggaacgtcacatatactttggcatacgccaggtcgcgagacatttcgacaccggaaacggtggtcatcatgcccaggcgaggatctttaatttcacgctgcaggatgagagcgatctctttttgcatttcctgcgctacgcgctgcgggcgaccaaattctttcgccataataaattctcctgacaaaaaaggggctgttagcccctttttaaaattaatttcaggtggaagggctgttcacgttgacctgataagacgcgccagcgtcacatcaggcaatccatgccggatgcagcgtaaacgccttatcccgcatggaaccctaaaaaccttaagcaatggtacgttggatctcgatgatttcgaatacttcgatcacatcgccagtgcggacgtcgttgtagttcttaacgccgataccacattccataccgttacggacttcgttaacgtcatctttgaagcggcgcagggactccagctcgccttcgtagataaccacgttgtcacgcagaacgcggatcgggttgtgacgtttaaccacaccttcggtaaccatacagcctgcgatggcaccaaatttcgggcttttgaacacgtcacgaacttccgccagaccgataatctgctgtttcagttccggagacagcataccgctcatcgccgctttcacttcgtcaatcaggttatagatgacggagtagtaacgcagatccaggctttccgcttcaatcactttacgtgcagaggcatcagcacgtacgttaaagccaaccaggatggcgttggacgccgcagccagggtggcgtcggtttcggtgataccacctacgccagaaccgatgatcttcactttaacttcgtcagtagacagtttcagcaaggagtcggagatcgcttcgacagaaccctgtacgtctgccttcaggacgatattcacttcgtgaacttcgccttcggtcatgttggcgaacatgttctcgagtttagatttctgctgacgcgccagtttaacttcgcggaatttaccctgacgatagagtgcaacttcacgcgctttcttctcgtcacgtacaacggtaacttcatcacccgcagccggtacgccggacaggccgaggatttccaccggaatggacggacccgcttccagcacttcctgacccagttcgttacgcatcgcacgaacacgaccgtattcgaagccacacagaacgatatcgcccttgtgcagagtaccttcacgtaccagaacggtagcaaccggaccacgacctttatcgaggaaggattcgataaccgcaccgctcgccatacctttacgtaccgctttcagctccagaacttccgcctgcagcaggatagcgtccagcagttcatcgataccggtacccgctttcgcagatacgtgtacgaactggctttcaccgccccactcttccggcaggatgccgtactgggagagttcgttcttaacgcgatccggatcagcttctggtttatcgatcttgttcactgcaaccaccaccggtacctgcgccgctttcgcgtgctggattgcttcgatggtctgcggcatcacaccgtcgtcggcagcaacaaccaggactacgatgtccgttgcctgcgcaccacgagcacgcatactagtaaacgcggcgtgccccggggtgtccaggaaggtgatcatgccgttttcagtttcaacgtggtatgcaccaatgtgctgggtaatgccgcccgcttcgccagaggccactttcgtactacgaatgtagtccagcagagaggttttaccgtggtcaacgtgacccatgatggtcacaaccggcgcgcgcggttcagccgcagcacccgtgtcacggtcgctcattaccgcctcttccagctcgttttcacgacgcaggataactttatggcccatctcttcagcaaccagctgtgcggtttcctgatcgataacctggttgatggttgccattgcgcccagtttcatcatcgctttgatgacctgagagcctttaaccgccatcttgttcgccagttcgccaacggtgatagtttcgccgatcacaacgtcacggttaacggcctgagcaggcttctggaagccttgctgcaggctagaacctttacgttttccgcctttaccgccacgtactgctgcgcgtgcttcttcacgatcagctttactttcagcgtgtttgttgcctttcttcggacgcgctgctttcgcgttacgaccacggccacggccgccttcgacttcacgatcgctttcgtcttctgcctggcgagcatgttgagaagtagtgacgtgataatcgctggaatcttcagtcggttccgcgttatcagtccatttgttttcttccgccatacgacgtgcttcttcagcaacgcgacgtgcttcttcttcgagtttacgacgcgcttcttcttcagctttacgcttgagctctgcagcttcctgctcacggcgggctttttcagcctgggcgtttttagtcatatcgtcttgttgattgctcactttgtctttttccgcagcttcacgtttcgcttgttcagcagcttcacgcttagcttgttctgcggcctcacgttcagctttttgttgcgcctcgcgtttagcgctttcttctgcctcacgacgggcttgctcttccgcttcacgctgcgcttgctcttccgctgcaaggcgttcagcctcttgcggatcgcgtttcacaaaggtgcgtttcttgcggacttcgatttgtacgcttttgctttttccaccggtaccaggaatgttaagggtgctgcgtgttttacgttgcagcgtcaatttgtccgggccactatttttctgattcaggtggtcaatcaaagtctgtttctcttgtgcagacacagagtcgtcagcagacttccggatacctgcatcagcaaattgctgtaccaggcgttccacggaggtctgtcgctctgcggccagcgttttaatcgttacatctgtcatgctgttccttcctgctacagtttattacgcttcgtcaccgaaccagcaaatattacgggcagccataatcagtgctccggctttttcgtcggtcaacccttcgatatcagccagatcatcaatgccctgttcggcgagatcttccagcgtacaaacgccacgggcggccagtttgaatgccaaatcacgatctaccccttcaaggttcagcagatcgtcagccggtttgttatcaccgaggctttcttcctgggcctgtgcaatggtggccagtgcatttttagcacgctcgcgcagtgcttcaacggtcggctcatcaaggccttcgatttccaacagctctttcatcggcacataggccaattcttccagcgtgctgaagccttcttctaccagaacagtcgcgaagtcttcgtcgatgtcgagatatttggtgaaggtgtcgatcgctgcgtgcgcttccgcctgatgcttagcctgcaggtcgtcaacggtcatcacgttgagttcccaaccgctcagctggctagccagacgcacgttctgaccgttacggccaatcgcctgcgccaggttaccggcttcaacggcgatatccatggtgtgtttatcttcatccaccacgatagaagcaacgtctgccggtgccattgcgttaatcacgaactgcgccgggttatcatcccacaggacgatatcgatacgctcgccacccagttcagtagacaccgcctgaacacgcgcgccacgcatacctacgcaagcacctaccggatcgatacgtttatcgttggttttcaccgcgattttcgcacgagaacccggatcgcgagccgctgctttaatttcaatcacttcttcgccgatttctggcacttcaatacggaacagttcgatcagcatttccggcttggaacgagtgacgaacagttgcgcgccacgcgcttccgggcgaacggaatagagcacgccacgaacgcggtcgccagggcggaagttttcacgcggcagcatatcttcgcgcaggatcacggcttcagcgttgttgcccagatccagagagatgttgtcgcggtttacttttttcaccacgccggtgatgatttcaccttcgtgttcacggaactgatcaaccaccatcgcacgttcggcttcacgcactttctgcacgataacctgttttgccgtctgggtagtgatacggtcaaaggtaacagactcaatctgatcttcaacgtaatcgcccaggttcaggctttcatcttcataacgtgcggcttcaagggtgatttccttggtcggctgggtgacttcatcaacaactaaccagcgacggaaagtgtcaaaatcaccgcttttgcgatcgatctgtacgcggacgtcgatctcttgttcatattttttctttgttgctgtcgccagcgcgctttccaatgcttcgaaaatcttctcgcgaggtagcgccttttcattggatacggcttcaactacagccaaaatttctttgttcatcgcgggcttttcacctcatccagactattaaaagtggggaaccaggttcgccttctggatattactcagcgcgaacacttcatctttaccttcgacggtaactgtgatcatttcaccgtctaccgctttgataacgccctgccatttacgacggttttgtaccgccatacggagaaccagagtcacctcttctccgacaaaacgggcgtagtgttcagccgtgaacagtgggcgatcgagacccggactggagacttccaggttataagcaacggtgatgggatcttcaacatccagcacagcacttacctggtggctcacatcagcacaatcatcaacattgatgccatcttcactatcaatatagatgcgcagtgtggatgtgcgaccgcgaataaattcgatgccaaccagttcaaaacccagggcctcaactggcgcagtaatcatctctgttaatttttgctctaatgtggacaagcccacccccaagacataaaaaaagggcctaaagcccagttattctgtagtcagataacaaaaaaccccgataaatcggggctttatataactgaaccctataaccgcaactgcggtctggagcactttccagaaggattttttcaaatcccactacgaaggccgaagtcttcacagtatatttgaaaaaggactctaagggaaagtggttgcgggggccggatttgaaccgacgatcttcgggttatgagcccgacgagctaccaggctgctccaccccgcgcctgaaacgtggcaaattctactcgttttgggtaaaaaatgcaaatactgctgggatttggtgtaccgagacgggacgtaaaatctgcaggcattatagtgatccacgccacattttgtcaacgtttattgctaatcatgtgaatgaatatccagttcactttcatttgttgaatacttttgccttctcctgctctcccttaagcgcattattttacaaaaaacacactaaactcttcctgtctccgataaaagatgattaaatgaaaactcatttattttgcataaaaattcagtgagagcggaaatccaggctcatcatcagttaattaagcagggtgttattttatgacgacgattctcaagcatctcccggtaggtcaacgtattggtatcgctttttctggcggtctggacaccagtgccgcactgctgtggatgcgacaaaagggagcggttccttatgcatatactgcaaacctgggccagccagacgaagaggattatgatgcgatccctcgtcgtgccatggaatacggcgcggagaacgcacgtctgatcgactgccgcaaacaactggtggccgaaggtattgccgctattcagtgtggcgcatttcataacaccaccggcggcctgacctatttcaacacgacgccgctgggccgcgccgtgactggtaccatgctggttgctgcgatgaaagaagatggcgtgaatatctggggtgacggtagcacctacaaaggaaacgatatcgaacgtttctatcgttatggtctgctgaccaatgctgaactgcagatttacaaaccgtggcttgatactgactttattgatgaactgggcggccgtcatgagatgtctgaatttatgattgcctgcggtttcgactacaaaatgtctgtcgaaaaagcctactccacagactccaacatgcttggtgcaacgcatgaagcgaaggatctggaatacctcaactccagcgtcaaaatcgtcaacccgattatgggcgtgaaattctgggatgagagcgtgaagatcccggcagaagaagtcacagtacgctttgaacaaggtcatccggtggcgctgaacggtaaaacctttagcgacgacgtagaaatgatgctggaagctaaccgcatcggcggtcgtcacggcctgggcatgagcgaccagattgaaaaccgtatcatcgaagcgaaaagccgtggtatttacgaagctccggggatggcactgctgcacattgcgtatgaacgcctgttgaccggtattcacaacgaagacaccattgagcagtatcacgcgcatggtcgtcagttgggccgtctgctgtaccaggggcgttggtttgactcccaggcgctgatgctgcgtgactctctgcaacgctgggttgccagccagatcactggtgaagttaccctggagctgcgccgtgggaacgattatagtatcctgaataccgtcagtgagaacctgacctacaagccagagcgtctgacgatggaaaaaggcgacagcgtgttcagcccagatgatcgtattggtcaattgaccatgcgtaacctggatatcactgatacccgcgagaaacttttcggttatgccaaaactggcctgctttcctcctctgccgctagtggcgtgccgcaggtggagaatctggaaaacaaaggccagtaattcgacatcaaccctgcccttcaggggtggggttaccttgcttatcctctgtaaactcctttctgagcatcacataatcgaaaacatcatggtttgcatccacaacccgactgtctcctttatagtgtgcaatcacttcctcaagcgtttgcggctgttccggctttgttacccccatccacgcattaataaggtaattattgtaagctgtgctaaagatgttgttttccgttgtgcgatccacgccatccccaagaacggggctataccagataaacatcgggacatgatatgcctgctggctagcctccctgcctccatgaaaatagacgttcttcttcgtagggtcacgttccaggccgtggtcggcaaaatacatgacgctggcgcggcgatcttttaataattcaaaaacctgacctagcaaactatctgtgtaatgaatggagttgtcatagcaggcatcctgatcgtcctgcggttgaaacacggcgctggattgcggataggcgctacaagccggttcatggcttccatttaaatgaagaacaatcagtttcttttgctgcgtattttgctgtaatgcttggcttaaatgcggcaacaacaattcatcaaatcctctgacataaactgtttccatggcgcgcatggcgatactggtaactgctgtaccattctgccgaaaagcggattggctgcttagccagaaagtctgaaatcctgcttgattagccatattaataatgttgtcggggtaattatgaatgtcatgactcaaaacagaatcagcagttaaagaaaggggaacgctcagcgcagtgtaaggtgcgccgcttattgcttgattaaacagtttgatctgttttctttgtgcttcaacttgcggtgtcgtagagcgtgtatatccatacaaagacatattgtcgacacgtacagactcccccacaatcaacacgtaggtatcaatacctgtatccctgacacttaattgaaaatacggcaccgtgtttgcaatactgagtaatctttgatgctctttcgctgctaaagcaaaatagttgagattgaaaaacggcgtataggtagcaaatcggctcgctagtatatatggactgaacgcttttttattttttgcatctttataagcaaattgacaagcggaaaataaactgccgctaatgacaatcagcaataatattcctgtcactttttttgtcggcaaggaaacatcatattttattattactgccaaaaaaagaagggataaaaaagcaaaggcacatagataagggatatacatccccagcattttgacaacttcatccggatcactctggagcacactaatcgcaaatccatcattgaaagttgtaccaaaggtacaccaactatagaggctaatactcatgtctgccgcagtcagtaacacaaatggtgcggcaacaagcaggcgaagcggaagggaacttatacgttttacaaccaggatggtcagaacgaagaacagcaagcgctgaaccatatgcgctccggaagaagcgactaagttcgtaataccaaaaacaataacacaaagatacaacaaccaatgagatttaaaagttctagcaaatttgttgaatactgtcatccagaaatccaagttcacaaccaatataaacaattatcaacaatgtttaattttatatcagacatgtttttcaactctgatccatatcagaacgaaacactgttagttttttctttttaaatgatgcggccattgcgttctcagtaattaaataacattatcaatgcgtctctaaacattacgcagaacgtagccatcagtcgttatactgacaggagcaggatggtttatcgagaagtaaacatatccgtattcgtaccggaactggagttgacacaataaagtgccaattatgtcagtagaagggaaaaatttataactaaggcgtaccggcaccatcgtttcaaggtaccagctacgagtaaagcaactggacgagatacagatacctgacaaccattcctcagaccaggaccaaaacgaaaaaagacgcttttcagcgtctcttttctggaatttggtaccgaggacgggacttgaacccgtaagccctattgggcactaccacctcaaggtagcgtgtctaccaattccaccacctcggcacggatactactttttagttcgggatatcgctggtcggcttagccggagcagctggctgagtttgttcggttttcgccggtgcactcagattttcccattcgctacctttattggttttgttgctattgatgttacccagcaccagactgatgatgaagaataacgttgccagcagcgccgtcatgcgggtcatgaagttaccagaaccactactaccaaacagcgtagcggaagcgcctgctccgaaggaggctcccatatcagcgcctttaccttgctgcagcatgatcagaccaacaaggccaattgccacaataaggaaaactactaaaagagcttcatacataatcaacctgttccttgcggagttgccgcgtaccaatgcttcaaccaataaagcgggagtttttaatctttcccactgaagcgggtgtgaatactaaccaaagcgaatgaccttcgcaagggcaattttatcgcattgtatcaactgcggaaaaaaacagcaaaaccgatgtgttcgctgagaaaaaaggcgacaatcgccgcctttttagccagttatctaacgctttaaacggcttttactgcatcggcgatgcggtgtgcaaattcagtcacctgcgcttcgtcttcgccttccaccatcacgcgaattaacggttcggtgccggatttacgcagcaacacgcgtccacggttgcccagcgcagcttcaacctctgcggtcacggctttaacactctcatgctcaagtggatcgccgctacctgcggtgtaacgtacgttaaccagaatctgcgggaacattttcatgccgctgcaaaggtcgtgcaggctcatatggttacgtgccatcgccgccagcacctgcaagccagcaacgatgccgtcaccggtagtagttttatccagcaggatcacatgaccggaattctctgcaccgatacgccagcctttctcctgcattttttccagtacgtagcggtcacccactttcgcgcgcgcaaatggaattcctaactgtttcagcgccagttcaagccccatgttgctcatcaatgtacccacagcgccaccacgcagctggccctgacgaagaccttcacgcgcgatgatatacatgatctgatcgccatcgactttattgccttcatggtcaaccataatcacgcgatcgccatcgccgtcgaaggcaataccgagatccgctttttcagccagcacacgagcctggagcgcgcgaacgtcggtagcccccacttcggcattgatgtttacaccgtttggctcacaaccgatagcgataacgttcgcccccagttcgcgcagcacgttcggcgcgatgtgataagtcgcaccgtttgcacaatccaccacaatcttcagttcactgaggctaagttcgttcgggaacgtggctttgcaaaactcgatatagcgacccgcggcatcaacgatacggctggctttacccagttctgcgctatcaacgcagctgatctccttttccatttccgcttcgatggcctcttctaccgcatccggcagtttggtgccgtcgatagagaagaatttaatgccattatcgtagaacgggttatggcttgcagatatcacaattccggcctctgcgcggaaggtacgcgtcagataagccacggccggtgttggcatcgggccagtgaagagtgcggaaaggcccgctgccgccagacccgcttccagtgcactctccagcatatagccagaaatacgcgtgtctttaccaataataatcttacgggagccgtggcgcgccagcactttacccgcggcccaacccagcttaagcacaaaatcaggtgtgatcggcgcatcccctacacgaccacgaatcccatcggtaccgaaatatttacgattactcatagcgtttgttttcctttgcagacagagtggcttccaccacccgcatcgcttctacggtttctttgacgtcatgaacacgaatgatgtgcgcgccttgcattgcggcaatgaccgcacaggccagactaccgctcaggcgctcggacggccccacgttcagcagctgcccaatcatgctttttcgactcatacccaccaacagcggcaggttgaaatggtgaaattcagccaggcgcgccagtaaactatagttatgggagagatttttaccgaaaccgaatccggggtcgagcaacaatttctcttttgcgatacccgcctgctcgcaacgtgctatttgctcaataaagtagcgattcacttctgcaaagacatcgtcatacttcggagcttcctgcatggtttttggatttccctgcatatgcatcagacaaaccggtaaaccggtttctgcagccgcctccagagcgccaggttcggaaagggagcggatatcattaataatgtgagcgccaactttcgcactctcacggatgacttctggtttggatgtatcgacactgatccagacttcgaagcgttgagcaattgcctcaaccacaggaataacacgttgcaactcttcttcaacgctaacttccgccgcccctgggcgcgtggactcgccaccaacgtcaatgatcgtcgcgccagcgttgatcatcagattcgcatgtttcaccgcatctatcaggctgttatgcgtgccaccatcgctaaaggaatcaggcgtgacgttgaggatccccattacgtgaggatggctaaggtccagactagtaccctgggcaaagagtttcatgatgttatccctggtatgaattgataagaaaaaaccccggagcacgccccggggttttcggtacaaatacagtcatctgatgcgggaacttacttgtcgcctaactgctcactcatggtgttacccgggttcggcgtacgcggttcatcaaccggacgaggagcctttggactaccattgtcgccagaattgttagaagcgcctggttcttcccagcccgctggcggacgtacatcgcgacgtgccatcaggtcatcaatctgcggtgcgtcgatagtctcatatttcatgagagcatctttcatcgcatgcagaatatccatattgtcggtcagaagctgacgcgcacgattatagttacgctcaatcagtgctttcacttcctggtcgatgatacgtgcagtttcatcggacatatgtttcgctttcgctacgctacggccgaggaacacttcaccttcttcttccgcgtacagcagtggacccaatttctcagagaagccccactgagtcaccatgttacgtgccaggttggtcgcaactttaatatcgttggacgcaccggtagatacatgttccggcccgtagatgatctcttctgccagacgaccaccgtacagcgtagaaatctggctttccagtttctgacggctggcgctgattgcgtcgccctcaggcaagaagaaagtcacacccagcgcacgaccgcgtgggataatcgtcactttgtgcaccggatcgtgttccggcaccaggcgaccgataatcgcatgacccgcttcgtggtaagccgtgctttctttctgcgcttccgtcatcaccatggagcgacgttccgcacccatcatgattttgtctttcgctttctcgaactcaaccatgctcacaacgcgtttgttgccacgagcagcgaacagtgccgcttcgttcaccaggttcgccaggtcagcaccggagaaaccaggagtaccacgggcaatgattgccgcgtcgatatcgggtgccaatggtacgcgacgcatgtgaactttcaggatctgctcacgaccgcgaacatctggcaagccgaccacaacctgacggtcgaaacggccaggacgcagcagggccgggtcgagaacgtccggacggttagtcgcggcgataacgatgataccttcgttaccttcgaagccatccatctcaaccagcatctggttcagagtctgttcacgttcatcgtgaccaccgcccagaccagcgccacgctggcggcctacggcgtcgatttcatcgataaagatgatgcacggtgccgctttcttcgcctgttcgaacatgtcacgaacacgggatgcacccacaccgacgaacatttctacgaagtcagaaccggagatagtaaagaacggaactttcgcttcgcctgcaatcgctttcgccagcagcgttttaccggtacccggaggaccgaccatcaagacgcctttcgggatcttaccgccgagtttctggaagcggctcggctcgcgcagatactcaaccagttcagcaacttcttcttttgcttcgtcgcagcccgcaacgtcagcaaaggtcgttttgatctgatcttccgtcagcatgcgcgctttgctcttaccaaagctcatggcacctttgccaccgccgccctgcatttgacgcatgaagaagatccagacaccaatcagcaacagcatcgggaaccaggagatgaagatagaagccagcaggcttggttcttcaggcggttcaccgacaaccttgacgttcttggtcaacaggttatccagtaatttcggatcctgaaccggaatgtaagtggtataacggttactatctttcttggtaacgttgatttcacgtccgttgatacgcgcttcacgaacctggtcgttattgacctcttgtaggaaggtagagtaatccaccttacggccattagactcgctgggcccaaagctctggaatacactcatcagcacaacggcaatgaccagccagagtattaggtttttcgccatgtcactcaagggattaacctcttattacaactgtgttaaaaacagcgtcaggatactctatatccagcatctttcaaactttcgtctgaaatctcccggttagggtttacgcccggtcgctacaatatacacttcccggctacgtgcacgagaagagtccagcttacgaactttgaccttcgtaaacagggagcgaatttcccttagatactcatcgaaaccttcgccctggaacaccttcactacaaaactgccacctggcgctaatacatcacgacacatttctagcgccagttccaccagatacatggcacgggggatatccaccgccggtgttccgctcatgtttggtgccatatcggacatgacaacctggactttgctgtcgccaacgcgctccagcagtgctttcatcaccagttcatcacgaaaatcgccctgaagaaagtccacaccaacgataggatccataggtaaaagatcgcaagcgatgatgcggcctttgccgccaatttgggtgaccacatattgactccaaccacccggagcagcaccaaggtcgacaaccgtcattcccggtttaaagagtttgtcactttgctgtatttcatcaagtttaaaccaggcacgggaacgtaacccctttttctgtgcctgttgaacatatttatcgctaaagtgttcctgaagccagcggctggagctggcagaacgcttcttacctgtcatttaactttcccatggggataactcatcgtaaccaattgcgtaaatttttacgcgcctatttggtgatatatgggagatggcggtagaatgacccgttttcaatcccaacgtaagcaaaaaatacgatgaatctgagtactaaacaaaaacagcacctgaaaggtctggcacatccgctcaagccagttgttctgcttggcagtaatggtttgaccgaaggggtgctggccgagattgaacaagcgttagagcaccatgaactcatcaaggtgaaaatcgccaccgaagatcgcgaaactaaaaccttgatcgtggaagctatcgtgcgcgaaaccggcgcctgtaatgtacaggtcatcggtaaaacgctggtgctttatcgcccaactaaagaacgtaaaatcagcctgccacgctaagattatcctaaagttacacacatttgctgtgtaaaacgaggggttttccgcaggcaggagagcaaaatgccacgctctgttcgttgataaaaggccgcatagcggcctttttcctttctttacaatacatcaacatcttgagtattgggtaattcttacaggtattccaccttaattacttcaaattctacttcgccgcccggcgttttgatgaccacaacatcatcttcttctttgccgatcaggccacgagcaatagggctgtttacagaaatcaggttttgtttaaagtcagcttcgtcatcgccaacgatgcgataagtctgttcttcgtcagaatccagattcagcaccgttacggtagcaccaaaaataacgcgcccattgttgggcattttggtgacatcaatcacctgcgcgttgctcagcttggcttcgatgtctttaatacggccttcgcagaaaccctgctgttcacgagctgcgtggtattcggcgttttctttcaggtcgccatgctcacgcgcttccgcgatagcagcaatgatttcaggacggcgcacagatttcagaaaatccagctcttcgcgtaatttttcagcgccgcgtaaggtcatcggaatagcttgcatttgttatacctcttgaatattcctgatagggcaagtcttcacccaccccggctgttcggcctgcccggcataactccttaccgggaccagaagcaaaaaaataccgacccgggtacaagtcccaggtcagctacaattcacattttgatagtcattttaccctgaagttcccgaagggtcatcgtttactttatagggcgttgcgccgtagtatgacggctcgattccaggttgttagcgcgagattatgcgattttccagatttatcatcggattgaccagctgtatagcgttcagtgttcaggccgcaaatgttgatgagtacattactcaactccccgctggtgccaaccttgccctgatggtgcaaaaagtcggcgcgagcgcccccgctattgattaccacagtcagcagatggcgctgcctgccagtacccagaaagtgattactgcgctggcggcgttgattcaactcggccccgattttcgttttaccacgacgcttgaaaccaaaggcaatgtggaaaacggcgtacttaagggtgacttagtggcgcgatttggtgccgatccgacgttaaaacgtcaggatattcgcaatatggtcgcgactttgaaaaaatctggcgtcaaccaaatcgatggcaatgtgttgatagatacctccattttcgccagccacgataaagcccccggctggccatggaatgacatgacacaatgctttagcgctccgcctgccgccgccatagttgaccgcaactgtttctccgtcagcctctacagtgccccaaagcctggtgatatggcttttatacgcgtggcatcttattaccccgttacgatgttcagccaggtacgcaccctcccccgtggttctgccgaagcgcaatactgcgaactggatgtggtgccaggcgacctgaaccgctttacgctgacgggatgcctgccacaacgttctgagccgctcccgttggcttttgccgtgcaggatggagccagctatgccggtgcaattctgaaagatgagttaaaacaggcgggtatcacctggagcggaacactgctgcgccagactcaggttaacgaacctggaacggtagttgccagtaaacagagcgccccgctgcacgatctgcttaagattatgctgaaaaagagcgacaacatgatcgccgatacggttttccgcatgataggccatgcgcgcttcaatgtgcctggaacatggcgggccgggagcgacgccgtgcgtcagatcctgcgccagcaagccggtgtcgatattggaaacaccattattgccgatggtagtgggcttagccggcataacctgattgcccccgccaccatgatgcaggtgctgcaatacattgcccaacacgacaatgaacttaactttatctccatgctgccgctggcgggctatgacggctctttgcagtaccgtgcaggtctgcatcaggcgggcgtggatggaaaagtcagtgcgaaaaccggtagcttgcagggggtatataacctggcgggattcattaccacagcgagcgggcaacgaatggcgtttgtgcaatatctttctggctatgcagtagaacctgcggatcagcgtaatcgccgtattccgttagtgcgttttgaaagccgtttgtataaagatatttatcagaacaattaatcaaaaagaaaccccggcacatggccggggcttcagattattgacaaagtgcgctttgtttatgccggatgcggcgtaaacgccttatccggcctacaaaatcgtgcaaattcaacatattgcaattctcttgtaggcctgataagcgtagcgcatcaggctgatttggcgtttatcatcagtgattaacgcttgtaaatgaactcaacgccttcttcgtcgtcttcgtcccagtcgtcatcccagtcttcatcatcctcttcagcaatctcttcaagctgctggcgatgataatcatcccacatgaattcgactttctctggctgtttcgcttcttcagcctgcacgaccgggttttcaatgataaaggtcatcacatcccagcagagatctttcacgcccagtccactcgccgcagagatcagataatatttatcttcccagcccagcgcctcagcgatcgctttcgctttctcttcggcttctaccttatccagcagatcgatcttgttgaacactaaccaacgcggtttcgtcgccagatcctggctgtatttttccagctcgctgataataatacgcgcgttttcaaccggatcggtgccgtcaatcggatcgatatcgatgaggtgcaacaggacgcggcaacgttccaggtgcttcaggaagcgaatgcccagacctgcgccttccgcagcgccttcaatcagtcctggaatatcggcaacaacgaagctcttttcgttgtccattcgtaccacacccagacttggcaccagagtggtaaacggataatccgccactttcggtttagccgcgcttaccgcacgaataaaggtgcttttacccgcgtttggcatccccaacataccgacgtcagccagcagcatcagctccagcagcagctcgcgcttatcgcccggcgtgccgttggttttctgccgcggtgtacggttaacggagcttttgaaacgggtattgcccagaccgtgccagccgcccttagcaaccagcagacgctgaccgtgtttggtcatatcgcccatggtttcaccagtaccctggtcgattacacgcgtacctaccggcactttaatcgtcacgtctttaccgcgcttaccggtacagtcgcggcttgcgccattctgaccgcgctctgcacggaaagatttttcaaaacgataatcgataagcgtgttcaggttctcgtcggcttccatccatacgtcaccaccatcaccgccgtcgccgccatccgggccgcctttcggaatatacttttcgcggcggaagctcacgcaaccattaccgccatcacctgcaacgaccagaatgcttgcttcatcaacaaacttcattttattctccgtaaatcattcgcctgcgcggggttggcttaccaccgttgtatgcttacgtaatccgccccaaatacgatgaccaatggcggaatacatcgcgcccgcaaccacgacaaacgcaccgagataacctaaaaggtttaacatcggtctggcgaagaaatcgggccaggccagacttaaaagatcactaaaaaacagcgtaaacagtggggtgagcgtgatgatcgcgctcacctgcgctgcctgccagcgagccatcgcttccgccagggcgccatatcctaccaaggtattcagtccgcaaaaaattaaacatgcgagctgccagtggctaagctgcgctatcactccaggctttgccagagggaagagcgcaattgtacataaagtgtacagtaaaaacaggatctgcggactggccagccgacgcaataaaaccttttgcgccacgccataactcacccaaaccgtcgccgcaccgaccccaaagataactccccaggtgtaatcggtgagctttgtaaatatctcgaccagactggtgttaaaaaacatcaccaggccgctcaggagcatcaatgcccctacaacctgagtgctgcgcattttctctttgaggataaatacgctggcaaccatcatgccaactgggctgagttgcccaatcacctggctagcggtcggactcaggtattgcaaggaactgctgaacaggatgaagttcccaaacagcccggcggtcgccactgccaacaaaatcaaccagcgtggcttacgaaacacgcgtaatggcggcaacctcttcttcaccgcaagaatggcacccaggccaatactcgccatcaagaaacggtaaaacacgattgtcggaggttccatcacctccagcacctgcttcattgcgattggcaacgccccccagcaaattgctgtggtgagcgccaaaagaatgccaatgcctgcctgctgcttcataccgtattccctgcaaagcgcatttgcggattaacgtcgcaccatgcgcatttttaccggttatcgaatgtaaaaagccccgcaacgtgttgcggggctttcatccgttaccgggacgcgaaaaacttattcagcttcgatgctgataaatttacggtttttcgggcctttaacttcgaatttcactttaccgtctgctttagcaaacagagtgtggtcacgaccgcaacctacgttagcgccagcgtggaatttggtaccacgttgacgaacgatgatgctacccgccagaacggattcgccaccgaaacgcttaacgcccaggcgtttagcttcactatcgcgaccgttacgtgtggagccgccagcctttttatgtgccatttgaaatctctcctcaggtcttaggcgctgatgccagtaattttcacatcagtgaaccactgacgatggccctgctgcttacgatagtgtttacgacgacgaaacttaacgattttaactttctcgccacgaccgtgagcaacaacttcagctttgattacgccgccatcaacgaaaggaacgccgattttgacttcttcaccgtttgcgatcatcagcacttcagcgaactcaacagtttcgccagttgcgatgtccagcttttccaggcgaacggtctgaccttcgcttactcggtgttgtttaccaccactttggaaaaccgcgtacatataaaactccgcttccgcgcacaccttttcaatgattcagagtgcgctataaatattcacaatagggcgcgaatattacgcaaaacgcacgcctttgacaagtgctacagtcaatacacgaagaaaaaaaacacaacttgtacggtaacgtttatctgtgccattttttcagtacaatcaccctatattcctaaccataaaccctaagttgcctttgttcacagtaaggtaatcggggcgaaaagcccggcttttgcgatgaatttagaaaaaatcaatgagttaaccgcgcaagatatggcgggtgttaatgcggcaatccttgagcagcttaattccgacgtccaactgatcaatcagttaggctattacatcgtcagcggcggcggtaaacgtattcgtccgatgattgctgtactggctgcacgagctgttggctatgagggaaatgcgcatgtcaccattgctgccctgatcgagtttatccacacggcgactctgctacacgacgacgttgtggatgaaagtgatatgcgcaggggtaaagctaccgccaacgccgcatttggcaatgccgccagcgtgctggtaggcgattttatttatacccgcgctttccagatgatgaccagcctcggtagcctcaaagtgctggaagtcatgagtgaagccgtaaacgtcatcgcagaaggtgaagttctgcaactgatgaacgttaacgatccggacatcactgaagaaaactacatgcgcgttatctatagcaaaaccgcgcgtctgtttgaggctgccgcgcagtgttccgggattctggctggctgtacgccggaggaggagaaaggcctgcaggattatgggcgctatctcggcactgctttccagttgatcgacgatttactcgattacaatgccgatggcgaacagttaggtaaaaatgtcggcgacgatctgaacgaaggtaaaccgacgctgccgctgctgcatgcgatgcatcatggcacaccagaacaggcacagatgatccgtaccgccatcgaacagggtaacggtcgccatcttctggaaccggttctggaagcaatgaacgcttgtggatctcttgaatggacgcgtcagcgtgccgaggaagaagcagacaaagccatcgcagcgttacaggtgctcccggacaccccttggcgagaagcactcatcggcctcgcgcacatcgctgttcaacgcgatcgttaatcccctcccctcatcccgcgcagcgcgcgggatggttccagtaagttccataaaaacacttattcagctctataacacctgaaaaatagggatgtgcatctttatatattctgaatattcacactctttacaggaactttttagagcaataggccatcaggagtatagtgatgctcgacagaagaagtgttctgaatgaaagcgactaacttaaggagtgaggaaaaatggaaagtaatttcattgactggcatcccgctgacatcattgcgggtttgcgcaagaagggaacgagtatggcggcggaatctcgcagaaatggtttgagttccagtacgctggcgaatgcattaagccgcccatggccgaaaggagagatgattattgcgaaagccctgggaactgacccctgggttatctggccaagtcgctaccatgatccgcagacccatgagtttatcgacagaacgcagttgatgcgtagctacactaaaccgaaaaaatgagtggtctggcggtagccccgcgaacggggctgccagctctcagacgattattcgcctttcacacgctcaatatttgcacctaaagcgcgcagtttgtcttcaatgcgttcgtagccacgatcgatgtgataaatacgatcaaccaccgtcgtcccttccgcaatacagccagccagcaccaggcttgcacttgcacgcagatcggttgccataacctgtgcgccagaaagtttttcaacaccgtgacaaataacggtattgctttcgatttcggcgtgcgcgcccatacggctcagctctggcacatgcataaagcggttttcaaagaccgtttcggtgataaacccggtcccttctgccaccaggttcaacagcgtgaactgggcctgcatatcggtcgggaatgccggatgcggcgcggtacgtacgttaacagccttcggacgtttgccatgcatatccaggctaatccagtcttcgccgacttcgatgtccgctccagcgtcacgcagtttcgccagcacggcgtcgagagtatctggctgcgcgttacggcagataattttgccgcgagaaatcgccgccgccaccaggaaagtaccggtttcgatacgatccggcagaacgcgatagacaccgccgcctaaacgttccacaccttcgatgacgatacgatcggtgccctgaccgctaattttcgcacccagcgtaatcaggaagttcgcggtatcgacgatttccggttcacgcgctgcgttttcaataatcgtggtgccttccgccagggttgcagcacacatgatggtcaccgttgcgccaacgctgactttatccatcacgatatgtgcacctttcaaacgaccatcgacggaagctttaacgtaaccttcttccagtttgatggtcgcgcctaattgttcgaggccagaaatgtgtagatcaaccggacgcgcaccgatcgtacaaccgccaggtagactaacttgcccctgaccaaagcgcgctaccagcggccccagcgcccagatagaagcacgcatggttttaaccagatcgtaaggtgcgcagaatacattaacgtcgcgggcatcaatatgcacagaaccattacgttctactttcgcacccagctggcttagcagcttcatacttgtatcgacgtctttcagtttcgggacgttctggatctctaccggttcttccgccagtagtgcggcaaaaaggataggcagagcagcatttttagcgccggaaattgtgacttcgccctggagcttcgttggcccctgaacacgaaatttatccatttagtttgttctcagttaacaattcatatccgctaccggcgaatcgcccatagctcaaaagccgttcagtttgcgatcgcgcgcccactccgcaggggtatacgctttgatgctcacagcatgaatgcggttatccgcaatatattccatcagcggaccatagaccgtctgctgttttttaacccgactcatgccgtcaaacaactcacccacggcaataacctgaaagtggctgccatcgccggaaacgtggacttcctggagggagagagcgttcatcaacacgctctgaatttcattattttccatgggatcttcaatcatcagttaataaaccagcgaaacatcttagagcaaagttgcgctggcataaataagcaaaaagcctcgctgataaatcagacaaggctcgacttgcaggcaggtttgccggacaggcggttaacgccatatccggcctgaaaaaatttaacgaggcagaacatcagcaggcaaattatacaatttcgccagggtatacactttgtcgtttaccccctgaagcgtcacattgttgccctgctttttcgccagatcgataagatggagcagcagtgccagtccccccgtatccacgcgggagacacggctaagatcgatgcaggtaatccccttcaccgcttcctcacgcatttcccaaagcggtagcaaaacgtcctgatccagctctccggataacgccagcgtgtcacccgtctgcatccagctcagactctcgctcattattttttctcttccagagtgattttctgttgagaaatgcttttcagttgcgcagtcaggccgtcgatacctttggtacgcagcagcgttccccactcgttttgtttggtggtgatcatactgacgccttcagcaatcatgtcgtaagcctgccaattgcccgtctgggagtttttacgccactggaagtccagacgcaccggcggacggccattcgggtcaataatggtaacgcgaataggcacaatggttttatcgcccagcggctgttctggcgcaatctgataggtttgaccgtgatacatcgccagcgcctgaccgtaagcctgcttcaggtactcacggaaagcggcaaagtaggcttcacgttgagcaggggtcgcactcttgtaatactggcccagcaccagcgcaccggcgtatttcacctgtacgtatggcagcagttcctgatcaacaatggtacgcagataatccgggttggcccgaatttgcggttgctcattcttcaggcgatcgaacgttttctgcgccgcctcgtccatcagcttatacggattggtctggtctgccgcggttgccgcactcagaggtgcaatcaccagcaaagcgaccatcattaaacgtttaaacatgcgtcggttctcctgaaattatttcgttgtacccacaggttcagtggtttcattattacctggcgcagcagctggcgcatcgccactattcttattgtcatcgcctttactaccgtaaaggaactgaccaatgagatcttccagcaccatcgcagacttagtgtcctgaattgtatcgccatccttcaggatagcagtccccagttccgggtcttcaaaaccgacgtttaatgccagatattgttcccccagcaggccggaagtacgaatgctcaggctactggtatctggaatgtggttataacgttgttcaatttccagcgttacgcgcggcagataggttttcgggtccagcgtaatatccgccacccgacccacaacaacgccaccaatactgaccggagagcgcgctttcaggccgccaatgttatcgaacgtcgcataaagcgtgtaggtcggttcagtacgtatggacgtcacgttcgccgccttcaggcaaacaaacagcgccgccagcagtgctgctaataaaaagatacccacccaaatttcattttttttcgtttgcatgaactcaattcccaaacatcaatgcggtcagcacaaaatccagccccagaacagccagagagctgtggacaacggtgcgagtggttgcccggctaatcccggcagacgtcgggatggcgtcgtagccgttaaacaagctaatccacgtcaccgtgatggcgaacaccacgctcttaatcagacagttgaccagatccatacgccagtcgacggcattttgcattgcgctccagaagaacccgctatcaatgcctttccaactgacgccgaccagagatccgccccagatccccacggcgacgaaaataaccgtcaacagtggtaaactaataaccccagcccagaaacggggagaaataacccgacgcagcggatccaccgccatcatctccatactggagagttgctctgtagcgcgcatcaggccgatttctgcggttagcgcgctaccagcacgcccggcaaacaacaacgcggcaaccaccggccccagttcacgcagtaggcttaacgccaccagcatacccagactggtttccgcactataagtggtcagaaccagataaccttgcagccccaacaccattccgatgaacacgccagaaaccacaataatcagcatgctcaggacgccgacattatagagctggcgcaccagcagcggcgcatgtttgcgaaattccggtttgccgaccagcgcattgaataacattaacccggcccgcccgaacgttctcagggttttaatccctttatgtccgaggctcgccagcgcatttaacagcatgagtggcttaactccctggtaaaagatcagcgtgataatcgccggcaggatagcggaacggaacaggcccgtcagctatcccgtccagaaactgacgtacgcgcggatcaggattcgcctgcaacgcctgggcactgccatgagcgacaatttttttgtccgccaggatccaggcgtgatccgcaatacttaacacttccggcacatcgtgagaaaccaccacacaagtcacgcccagcgcgctgttcagctcagaaatcagcttcaccagtacgcccatggtgatgggatcttgcccaacaaaaggttcatcaaacatgatgagatccggctccagcgcaatcgcacgcgccagcgctgcacgccgcgccatcccaccggaaagttcagaaggcattagtttagccgctccacgcagccccacggcctccagcttcatcatcaccgtactatgcaacaatggcgcgggaagttgggtatgttcgcgcagtggataggcgacgttgtcaaatacgttcatatcagtgaacaacgccccggactgaaataacatgctcatccgtttgcgcactgtatacaggcggctacgagacatcgccggaatattctcaccatcgaaaaggatctcaccatgatctggtgcgatttgcccgccaatcagacggagtagcgtcgttttaccgatgccgcttggccccatgatcgccgtgatcttccctcgcggcacggtcagggaaatattatcgaagatgcagcgattgccacgcgtaaaactgacatcgcgcatatcgactaaattcgccacagactgctccataattcacccttcgtcttgcgttgattttctaagcatggcgctcaatttaaccttgaacccaacatatttacagaatattacccgccgtggttagcgaaagctggcatttgttttactttttagccgcataaagtcaaaattaagcatccgttacggctttctgaaaatcttcagcggaccggcgagtatacctgaagaaaggacgttagatgcttttagctacggcactgttaattgttggtttacttttggtcgtttacagtgccgaccgcctggtttttgccgcgtctattctttgccgaacctttggcatcccgccgctgatcatcggcatgacggtggtcagtattggtacaagcttaccagaagtcatcgtcagccttgccgcgtctctgcacgaacaacgcgatttagccgttggtacagccctcggcagtaacattatcaatatattgctgatcctcggtctggctgcgctggttcgtccttttaccgtccattctgatgttctacgccgtgaattacccttaatgttgttggtcagcgtggtggccggttccgtactctatgacggacaacttagtcgcagcgatggtatctttctcctctttctggctgtgctatggctgctgttcattgttaaacttgcacgtcaggctgaacgtcaggggactgacagcctgaccagagagcagcttgcagagctgccgcgtgacggcggattgcccgtcgcgtttttatggctcggcattgcgcttatcatcatgccagtggccacgcggatggtggttgataacgccacggtgctggcgaattactttgccatcagcgagttgacgatgggtctgacggcaattgctatcggaaccagcctgccggaactggcaaccgcaatagcgggggttcgcaaaggtgaaaacgacattgctgtcggaaatatcattggcgcaaacatttttaatattgtcatcgtgttgggtttacccgcgctgataacgccaggagagattgatccactggcgtacagtcgtgactacagcgtgatgttgctggtgagcattatttttgcgttgctgtgctggcggcgctccccgcaaccgggccgtggtgtaggggtattattaactggcggatttatcgtatggctggcgatgttgtactggttaagcccaatactcgttgaataactggaaacgcattatgagccacgtagagttacaaccgggttttgactttcagcaagcaggtaaagaagtcctggcgattgaacgtgaatgcctggcggagcttgatcaatacatcaatcagaatttcacgcttgcctgtgaaaagatgttctggtgtaaagggaaagttgtcgtcatggggatgggaaaaagcgggcatattgggcgaaaaatggcggcaacgtttgccagcaccggtacacctagttttttcgtccatcctggtgaagccgcgcatggtgatttaggcatggttaccccacaggatgtggtgattgctatctctaactctggtgaatccagcgaaatcacggccttaattccagtgcttaagcgtcttcacgtaccgttaatctgcatcaccggtcgcccggagagcagcatggcgcgcgccgcagatgtgcatctgtgtgttaaagtagcgaaagaagcctgtccgttagggctggcaccgaccagcagcaccaccgccacgctggttatgggcgatgccctcgctgtcgcgctgttaaaagcacgcggctttactgctgaagattttgcgctcagtcacccaggcggcgcactgggtcgtaaacttctgctgcgcgtaaacgatattatgcatacgggcgatgagatcccgcatgttaagaaaacggccagtctgcgtgacgcgttgctggaagttacccgcaaaaatcttggtatgactgtcatttgcgatgacaatatgatgattgaaggcatctttaccgacggtgatttacgccgtgtcttcgatatgggcgtggatgttcgtcagttaagtattgccgatgtgatgacgccggggggaatacgtgtgcgccctggcattctggccgttgaggcactgaacttaatgcagtcccgccatatcacctccgtgatggttgccgatggcgaccatttactcggtgtgttacatatgcatgatttactgcgtgcaggcgtagtgtaaagattcaaggataaacaacaatgagcaaagcaggtgcgagccttgcgacctgttacggccctgtcagcgccgacgttatagcaaaagcagagaacattcgtctgctgatcctcgatgtcgatggcgtactgagtgatggcctgatttatatgggcaataatggcgaagagctgaaagcgttcaatgttcgtgacggttatggcattcgttgtgcgctcacctctgatattgaagtcgctatcattaccgggcgaaaggctaaactggtagaagatcgttgtgccacattggggatcactcacttgtatcaggggcagagtaacaaactgatcgcctttagcgatctgctggaaaaactggcgattgccccggaaaatgtggcttatgtcggcgatgatctcatcgactggccggtaatggaaaaagtgggtttaagcgtcgccgtggccgatgcgcatccactgttgatcccgcgcgccgattacgtgacgcgcattgctggcggtcgtggcgcagtgcgcgaagtttgcgacttattactcctggcgcagggcaaactggatgaagccaaagggcaaagcatatgagtaaagccagacgttgggttatcattgtgctaagtctggcggttctggtgatgatcggcattaatatggccgaaaaagacgataccgcccaggtggtcgtcaacaacaatgatcccacctataaaagcgagcatacggacacgctcgtctataacccagaaggggcactaagctatcgattgattgctcaacacgttgaatattattccgatcaggccgttagctggtttacgcagccggtacttaccacgtttgataaggataaaatcccgacatggtccgtaaaagcagataaagccaagctgaccaatgaccggatgctctatttatatggacacgttgaagtcaacgcacttgtgccagactctcaacttcgcagaatcacgacggataacgcgcagatcaatctggtgacgcaggatgttacctctgaagacctcgtcacgttatacggaacaacatttaactccagcggtctgaaaatgcgcggcaacttacgcagcaagaacgccgagctgattgaaaaggttagaacatcctatgaaattcaaaacaaacaaactcagccttaatcttgtgcttgccagcagtcttctggccgccagcattccggcatttgccgtaaccggagacactgatcagccgatccacattgaaagcgaccagcaatctcttgatatgcaaggcaacgtggttacctttaccggtaatgtcatcgtcacccagggcaccatcaaaattaatgccgacaaagtggtcgttacccgtccgggcggcgaacaaggtaaagaagtgattgacggctacggtaaaccggcaacgttctaccagatgcaggacaacggtaaacccgttgaaggtcacgcttcccagatgcactacgaactggcaaaagattttgtcgttctgacgggtaatgcttatctgcagcaggtcgatagcaacattaagggcgataagatcacttacctggtgaaagagcagaaaatgcaggctttcagcgacaaaggcaagcgcgtaacaaccgttctggtgccgagccagctgcaggacaaaaacaacaaaggccagaccccggcacagaagaagggtaattaattcgttatggcaacattaactgcaaagaaccttgcaaaagcctataaaggccgtcgcgtggtagaagacgtcagcctgaccgtcaactccggggaaattgtcggtctgctggggccaaacggtgccggtaagaccaccactttctacatggttgtaggcattgtgccgcgcgatgcgggcaacatcattattgatgatgacgatatcagtctgctgcctctgcatgcacgcgcgcgccgcggtatcggctatctgccacaggaagcctccattttccgtcgcctcagcgtttacgataacctgatggcggtactgcaaattcgtgacgacttgtctgctgaacaacgtgaagaccgcgcgaacgagctgatggaagagtttcacattgagcacctgcgtgacagcatggggcagagtctctccgggggtgaacgtcgccgtgtagaaattgcccgcgcactggctgcgaatccgaaatttattctgctcgacgaaccgtttgccggggttgacccgatcagcgttatcgacattaaacgcatcattgagcacctgcgcgacagcggcctgggcgtgctgatcactgaccacaacgtgcgtgaaacactggcggtttgtgaacgcgcttatatcgtcagtcaggggcatttgatcgcccacggcacgcctacagaaatcttacaagacgaacacgttaagcgtgtataccttggggaagacttcagactctgatagggtagaagtttgcgacgttttagcaggagagtacgattctgaacatgaagcaaggtttgcaactcaggcttagccaacaactggcgatgacgccacagctccaacaggcaattcgtctgttgcagttgagcacgctggaacttcagcaggagctacagcaggcgctggagagtaatccgctgcttgagcaaatcgacactcatgaagaaatcgacacccgcgaaacgcaagacagtgaaacgctggacaccgccgacgcgctcgaacaaaaagagatgccggaagagctgccgctcgatgccagttgggacaccatttacaccgctggtacaccatccggcaccagcggtgactacattgacgacgagctgccggtctaccagggcgaaacgacgcagaccttgcaggattacctgatgtggcaggttgagctgacaccgttttccgacactgaccgcgctattgctacctctatcgtcgatgccgttgatgaaaccggttatctgactgtcccgctggaagatattctcgaaagtataggcgatgaagagatcgacatcgacgaagttgaagccgtccttaagcggatccaacggtttgatccggtcggtgtggcggcaaaagatctgcgtgactgtctgctgatccaactctcccaattcgataagaccacgccgtggctggaagaggccagactgatcattagcgatcatctcgatctgttagccaatcacgacttccgcactttaatgcgcgtcacgcgtctgaaagaagatgtgctgaaagaagccgtcaatctgatccagagcctcgatccgcgccccgggcagagcatccagactggcgaacctgagtatgtcattccagatgtgctggtgcgtaagcataacggtcactggacggtagaactcaacagtgacagcattccgcgtctgcaaatcaaccagcactacgccagcatgtgcaataacgcgcgcaacgatggtgacagccagtttatccgcagcaatctgcaggatgccaaatggttgatcaagagtctggaaagccgtaacgatacgctactgcgcgtgagtcgctgtatcgttgaacagcagcaagccttctttgagcaaggtgaagaatatatgaaaccgatggtactggccgatatcgcccaggctgtcgaaatgcatgaaagcacgatatctcgcgtgaccacgcaaaaatacctgcatagtccacgaggcatttttgaactgaagtatttcttttccagtcacgtcaataccgagggcggcggcgaagcttcctccacggcgattcgtgcgctggtgaagaaattaatcgcggcggaaaacccagcgaaaccgttgagcgacagcaagttaacctctttgctgagcgaacaaggtatcatggtggcacgccgcactgttgcgaagtaccgagagtctttatccattccgccgagtaaccagcgtaaacaactcgtttgacccaaccgataaggaagacactatgcagctcaacattaccggaaataacgtcgagatcaccgaggcactgcgcgaatttgttacagccaaatttgccaaacttgagcaatattttgaccgaatcaaccaggtctatgttgttctgaaagtggagaaagtcacccacaccagtgatgcaacactgcatgtaaacggtggtgaaattcatgccagcgcggaaggtcaggacatgtacgctgccattgatggcttaattgataagctggcacgccagttgaccaaacataaagataaactgaaacaacactaattgtccgggcaattagcatgtgcatggcggtctgttgtgcggcacaacgggccatttgtacggttaatgctccgagcctgttccactgtttgagtgggcaggttcttaggtgaaattatgacaaataatgatacaactctacagcttagcagtgttcttaacagggaatgtacgcgaagccgcgtccactgtcagagcaaaaaacgcgccctggaaatcatcagcgagctggcggcgaaacaacttagcctgccgcctcaggtggtttttgaagctatcctgacgcgggaaaaaatgggcagtaccggtatcggcaatggtattgccattccgcatggcaaactggaagaagatactctgcgcgccgttggcgttttcgttcagctcgaaacgcctatagctttcgatgccatcgacaaccaaccggtggacttactttttgccctgctggtgccggcagaccaaactaaaacgcacctgcatactctgagcctggtggcgaaacgtctggcggacaaaaccatctgccgccgtttacgcgcagcccagagcgatgaagagctgtatcaaatcattacggataccgaaggtactccggatgaagcgtaattattcggtaatgtctcttttagacgttgtgaggagaaacagtacatggtactgatgatcgtcagcggacgtagtggtagtggtaaatctgtcgccctgcgtgcgctggaagatatgggtttttactgcgtggataaccttcccgtagtgttgttacccgatctggctcgaaccctggccgatcgcgagatttctgccgccgtcagcattgatgttcgtaatatgccggagagtccagaaatattcgaacaggcgatgagtaacctgcctgacgctttcagtccgcaactcctgttcctggatgccgaccgtaataccttaattcgtcgttacagtgacacgcgccgactgcatccgctttccagcaaaaacctgagcctggaaagtgctatcgacaaagaaagcgatttgctggagcctctgcgtagccgagcggatctgattgtcgataccagtgaaatgtccgttcacgagctggctgaaatgctgcgtacccgtctgctgggtaaacgtgaacgcgaactgaccatggtctttgagtctttcggcttcaaacacggtatccctatcgatgcagattacgtctttgacgtgcgcttcttgccgaacccgcactgggatccgaaactgcgtccaatgacaggtcttgataaacctgtcgccgcgttcctcgaccgccacacagaagtacacaattttatctaccagacgcgaagctatcttgagctatggttacctatgctggaaaccaacaaccgtagctacttgacggtcgccattggttgtaccggcgggaagcaccgtagcgtgtatattgcagagcaactggcagactacttccgcagccgcggtaaaaacgtccagagtcgccatcgtacgctggaaaaacgtaaaccatgaccgtcaagcaaactgttgaaatcacaaacaagctgggcatgcatgcccggcctgcaatgaagctgtttgaattaatgcagggttttgacgctgaagtgctcttacgtaatgacgaaggcaccgaggctgaagccaacagcgttattgcgctgctgatgttggattctgccaaaggacggcagattgaagttgaagcgaccggtccacaggaagaggaagcactggccgccgttatcgccctctttaattctggttttgatgaagattaatcttcatcactttgacatacaactcccttcaaactccccccgacaataagaaaatcacgtactgaaatcgttctcaatcaacgtcatttgtacattttgtgcgcttttcactttcagaagaaccttaagaaaaccttaagaggcattgtttaggttttgtttaagttaatcgaccatactggagatcgtcagaaaatatttccaggagatggcatgattcgcttatctgaacaaagtcccctgggcaccggaagacatcggaaatgttatgcgcatccggaagatgcccaacgctgtatcaagattgtctaccatcgtggcgatggtggcgataaagagatccgccgtgagttaaagtactacgcgcatcttggtcgccggttaaaagactggagtggaataccgcgctatcacggtaccgttgagacggattgcggaaccggttatgtctacgatgtgattgcagattttgacggcaagccttccattacgctgaccgaatttgctgaacaatgccgttacgaagaagacattgcacaactgcgccagctactgaaacagctgaagcgttatttgcaggataaccgtatcgtgacgatgagcctgaagccgcagaatatcctctgtcaccgcatcagtgagagtgaggttatcccggtcgtctgcgacaacattggtgaaagcacattgattccactggcgacctggagcaagtggtgttgtctgcgtaagcaagagcggttatggaaacgatttatcgcccaaccggcgctggctattgccctgcagaaagatctgcaacctcgtgagagcaaaacgctggccctcactagccgcgaagcttaatccagctggtgttgttgcataaacggctcaccgcctaactgatacatctgccgtaaaatccacgcctgacggctacgcacgtagccgcttgggctggagactttgaaacgaagtggattaggtaatacagctgccagtaatgcagcttcgctccgggtaagtttgctcgcgggtttgtggaaataacgttgtgccgcagcttcgacgccaaacacaccgtcgccaaattcggcgatattcaggtaaaccgtcaggatacgctttttgctccagaccgtttctatccccagcgttaatccggcttccagcccttttcgaacccagctacgcccatcccataaaaagagatttttggctgtctgttgagaaatcgtactagcaccgcgaatacggttttcattgcgctcgttgtgcgccagggctttctcaatggaagcgacatcaaagccccagtgctcaggaaatttctgatcttctgcggcaatcaccgccagtcccatccacgggctgatttgatccatactgacccagtcagaatgtgccacgtaacgaaaattgccatgcagccaggcgctgacctgtcgctcgaccattaccgcactgaagggaacaggcgcaacgctaaacaacgcgatgcccccgccccagaaaacggcgaggacaaccattaaccgcaaaagaaaacggcgaacgaaactaaacaccgttaagcggcttttactcattcagccagaaccagcacgcgggaaaccagcttatcaatgccgctcgccgcttctgcaatgttctgcgccagcatatatgctggggtggtgacaatcttattgtcttcatcaaccacgatatcatcgacaggacacggcacatgctccgcgcccatctcttccagcacttctgcggtatcgatatcagtaccgatggtcaaacgcagcgggaaatcgaaaattttcggcagcatcgccggggcaatacacataaaaccaagcggttttccggcctgatgcatcgcttgtgccagcgcctttaattcacggtcaacggtgcattcgctaccaagactggcaaaattgcttaaattcttcgccgcgccaaacccccccggcacaatcaacgcatccagttcagcggcatcggcctgggccagaggacggatttcaccgcgcgttattcgtgccgcttcaatcagcacattgcgcgtttccgtcatcgcttcgccagttaaatggttgataacatcaacctgctgcttatccggtgcaaagcagaccgcctgcgcaccgctgcgactaatagctaacaacgtcaacaccgcttcatgaatttcagaaccgtcatagacgccgcatccgctcagaattacgccaattttcttcattgtgatcatcctttcgcaattgactgaaacacattaatttttttaataaaaatggtacgcatcacacatttaactgattcatgtaacaaatcatttaagttttgctatcttaactgcgtgcggcctgaaaaacagtgctgtgcccttgtaactcatcataataatttacggcgcagccaagatttccctggtgttggcgcagtattcgcgcaccccggtctagccggggtcattttttagtggcttttgccacccacgctttcagcacttctacgtcgtgacgccactcttctttcatctcttcaatccattcaccgacgttatcttcccaggccggaaggtcaggagactgaatttgctgacccagctgttgcagatggcgtaaccccacactccccgccgcacctttaattttatgtccttcctcaacaatgccttttttatcctgcgccgtcagattgctctccagcacgctgacatagcccggcatcatcttctcaaacaccgctaacccgtcggtgatcagcttcggtcctacaagttcgagatactgttccagcatgggaatatcgagcaatgcttcacttttactgttctcttctgtcgtcaccgtactctcctcatcatcctgggtatcccagaatttcttgatcatcgcggttagcgccggaacagaaagcggcttactcagcacatcatccattccagcattgaggtactcttgtttgtctttcagcacgttagcggttaaggccaccagcggcggtaaatcctcgcgcggataacgtttcgtcagttcacgagagatatccagcccggtcatatctggcaactgaatatccagcaacaccaggtcgtattcgcccggtttaaacatctccagcgccgccttgccggtcatggcgacatcaacgctgttacctaatttttccagcacagaacgcgcaacaatcacgttcagttcaatgtcttccaccagcagcacattcagcgccggtaaaggcatatcgtcttcatcaaacgcatcatcgacctcttctgctacgctcggtgcgtggatcgtcaacgtaaaggtactacctttgccctgttcgctggtaaccgtaatatcgccgcccatatttttcgccagacgacgagaaacggccagaccaataccggtgccggtggcaggtttaccgccatgactgtctttcacctggtaatacatggcgaaaattttatccagctcatcctgcggaatgccgataccagagtcttccacttcaaaatgcagcatatcgccttcatcgtagcgcacgcgcacggtaacctggccttgctgggtgaatttgacggcgttactgatgaggttccacaggatctgccgtaaacgcgtcccgtcggtaatgacctgatgcggtaatggcagcgtcggctccaggttaaagcgcaatcctttttgttgcgcctgcaatgcggagagattttccagatcggcaaggaagctggtgaaatcaaccggttgattatcaagctggaccttgcgccgttccatcttatccatgtcgataatatcgttaaagatattccccagcgtgacggcgctaacatggatggtcttgagatatttttcctgctcggcggtgagttcggtatccagcagaatgcggctcagaccgacgataccgttcagcggtgtacgcaattcgtgactgatggtggagataaacgtcgttttgtcgcggctggcccgttcaagcgcatcctgataccgcttacgctcggtaatgtcgcgaccaaagcccatcaaaccgtgacgtttacccacgcggtcgtagtacggcactttacggatttcaaagcaggctttgcgcccgtccgggtaatccagccactgttcataggtcagactcacattatgacggaacactttttcatcggtttcaatgacttttgcggcggcttccggactgtaaacatcagcaggtttcaggtgaaccagttgtttttcgctttttccggtcagcagctccatcgcgcggttacagccggaaaactctttatcttcgttacgataaaaaaccaggtcgggactagcatcaaggaaggaacgtaagaaactggattgctgctcgagctgaatttgtgtctcttcgcgctctttgatttcaattttcagttggccgaaggtttcctgcagttctgcttccgctttttcacgaacggcaatttcctgatttagctgggcaatattatcttttaactgaacgttgaggctcaaatcgcgctcgcgcatctcctccagtttttgcaccagccgactcagacgttgtcgactctcctccagttgctcgacgaccacgcttagaaagtagaccgcccacggcgtaatcagcaaaccaaagaagatagaacgaataacatcaatgctttcgacctgaccatgcagcaccatggttaccgccatttgtaccacaatggcaagaacgacgagggccagcgccagcaacatactgaagcgcaccagacctaacttcatcatcaggtcaacataatactgcgccagcagacgaatttgcttcattagggaattccttcacgacaacctgccccaataatacccaattctgacagttacgttataaattgtgtgagaaatgcggaattcccctcaacgacttactccgttggaggtagccacggacgtcccagcgcgcttccctgtacgccatgttcattcagatagcgatccagctcgaccattcccgtccatcgattttcgcaccacagcggagcaagcagcgtcgggcgacgggcgctggcggaaatgcggtggtagatcacttccggtggcgtatggcgaatcatttctccggcagtgagcgtgtaatcctccagttcaataccgttcaaacgccccgcttcccaggctttcgccataatgctgcctttcacaatatgcagcggatgcagctttatgccgtccacgccggtttcaaccactcgctccagcgtttgcaaacattcagcctgcccttcgccaggcaggccgacaattaagtgggaacacaccttcagcccgcgctgacgtgccagctgggttgtacgctgataacaggcaaaatcatggccgcggttgatgcgatgcagtgttttgtcgtgggcggtttgtagccccagctccagccacacttcgtaaccctggtccttatattcgcaaagcagatccagcaccgcatccggcacgcagtccgggcgggtacccacacacaaaccgacaatattggcctggctcaccgcctgctgatacatagaacgcagcacctgaacttccgcaaaggtgctggtatacgcctgaaagtaggccagatagcgtttagcgcggttaactaaattcgcctggtgcgccagttgctcggcaatggaacgatgctgctgcgcttcatcggcaaagctggcaacattacagaatgtgcagccaccacgcccgatggtaccgtcacggttagggcagctaaaaccgccgtgcagcgtcagcttatgcaccttttgcccataacgacgggtgagatcaccaccaaacatattgactaatttctgtaactgcataatctgatagaccgcgccttgaaaagaggccaaagcctgccatttttagctcaattcggcgatgacctggatcaatcgtcccggcctgcttttatcaactgcataatcaatcaaaattaccgaaatttcatgcataatcacataaatcacttttgcttatcttgtgtcagatttttttatctcctgatggattttaggcaaaaacagtagcatgaaacgtcattaccaattaaggcagtataaaatgctggttttgtcgtcagttcaaggcaggataagggttaacacacctttatgacagtcaggaattgactgtttctctaacgacttcccttttagccttaaagataaaatccattttaatttcagtcatttaataaagaattttgcgctaaagcacatttctgtaccaataagcttgccatttgacctgtatcagctttcccgataagttggaaatccgctggaagctttctggatgagcagcctgctcatcatatttatgcagtaattgagatcccctcttcaccgtattaaccgatgcgaaaaggacaacaagggggcgaatgcgaggcgcgcgtatgacacgcaaaccccgtcgccacgctctttctgtgcccgtgcgcagcggtagcgaagtggggttcccgcagagcctgggggaggttcacgatatgttgtacgataaatcccttgagagggataactgtggtttcggcctgatcgcccacatagaaggcgaacctagccacaaggtagtgcgtactgcaatacacgcactggcccgcatgcagcaccgtggcgcgattctcgccgatggtaaaaccggcgacggttgcggcttgctgttacaaaaaccggatcgcttttttcgcatcgttgcgcaggagcgcggctggcgtttagcaaaaaactacgctgtcgggatgctcttcctgaataaagatcctgaactcgccgctgccgcacgccgcatcgttgaagaagaactgcaacgcgaaaccttgagcattgtgggctggcgtgatgtccccactaacgaaggcgtgctgggtgaaatcgccctctcctctctgccacgcattgagcaaatttttgtgaacgccccggcaggctggcgtccacgcgatatggagcgccgtctgtttatcgcccgccgccgcattgaaaagcgtctcgaagccgacaaagacttctacgtctgtagcctgagcaatctggtgaacatctataaaggtctgtgtatgccgacggatctgccgcgcttttatctggatcttgcggacctgcgtctggaaagcgccatttgcctgttccaccagcgcttctccactaacaccgtaccgcgctggccgctggcgcaaccgttccgctatctggcgcataacggtgaaatcaacaccatcaccggtaaccgccaatgggcgcgtgcgcgtacttataaattccagacaccgcttatccctgacctgcacgacgccgcaccgttcgtcaacgaaaccggctctgactccagtagcatggataacatgctggaactgctgctggcaggcgggatggatatcatccgcgccatgcgtctattagtaccacccgcctggcagaacaacccggatatggacccggaactgcgtgccttctttgactttaactccatgcatatggagccgtgggatggcccggcgggcatcgtgatgtccgacggtcgttttgccgcctgtaacctcgaccgtaacggtctgcgtccggcgcgctacgtcatcaccaaagataagctcatcacctgcgcctctgaagtcggtatctgggattaccagcctgacgaagtggtcgaaaaaggccgcgtcgggccaggcgaactgatggttatcgacacccgcagtgggcgtattctgcacagcgcagaaaccgatgacgatctgaaaagccgccatccatataaagagtggatggagaaaaacgtccgccgactggtaccgtttgaagatctgcccgatgaagaagtgggtagccgcgaactggacgacgacacgcttgccagctaccagaaacagtttaactacagcgcggaagagctggactccgtaattcgcgtactgggcgaaaacggtcaggaagcggtcggtagcatgggcgatgataccccattcgccgtgctctccagtcagccgcgcattatttacgactacttccgccagcagtttgcccaggtgactaacccgccaatcgacccgctgcgtgaagcgcatgttatgagcctcgccaccagtatcggtcgtgaaatgaacgtcttttgcgaagcagagggccaggcgcaccgtttaagctttaaaagcccgattctgctctactccgatttcaaacagctcacgacgatgaaagaggagcactaccgcgcagatacgctggatatcacctttgacgtcactaaaaccacgctcgaagcgacagtcaaagagctgtgcgacaaagccgaaaaaatggtacgtagcggcaccgtgctgctggtgctctccgaccggaatatcgctaaagatcgcctgccggttccagccccgatggcggttggcgcgatccagacccgtctggtcgatcaaagcctgcgttgcgatgccaacatcatcgtcgaaaccgccagcgcccgcgatccgcaccacttcgccgtgttgctgggcttcggcgcgacggctatttatccataccttgcctatgaaacgctgggccgcctggtagacacccatgcgattgccaaagattatcgtaccgtgatgctcaactaccgtaacggcatcaacaaaggcttgtacaaaatcatgtccaaaatgggcatctccaccatcgcctcttaccgctgcagcaaactgtttgaagcggtcggtctacacgatgatgtagtgggcctgtgcttccagggggcggtcagccgcattggtggagcaagctttgaagacttccagcaggatctgctgaatctgagcaaacgtgcctggctggcgcgtaagcccatcagccagggcggtctgctgaaatacgtccacggcggcgaataccacgcctacaacccggacgtggtgcgcacgctgcaacaagcggtacaaagcggcgagtacagcgactatcaggaatacgcgaagctggttaatgagcgtccggcaaccacgctgcgcgatctgctggcaattacgccgggtgaaaacgcggtcaacattgctgatgttgaaccggcaagcgaactgtttaaacgctttgataccgccgcgatgtctatcggcgcgttaagcccggaagcccacgaggcgctggcggaagcgatgaacagcatcggcggtaatagcaactccggtgaaggcggcgaagacccggcgcgctacggcaccaacaaagtgagccgcatcaagcaggtggcttccggtcgctttggggttactccggcgtatctggtcaatgccgacgtcattcagattaaagtcgcccagggcgcgaagccaggcgaaggcggtcagttgccgggtgataaagtcacgccttacatcgccaaactgcgctatagcgtgcccggagtgacgctgatctccccgccgccgcaccacgatatctactctatcgaggacttagcgcagctcattttcgacctcaagcaggttaacccgaaagcgatgatctccgtgaagctggtttccgaaccgggagtaggcaccatcgcgactggcgtggcaaaagcttatgcggacttgatcaccatcgcaggctatgacggcggcaccggcgcaagtccgcttagtagcgtgaaatacgcaggctgtccgtgggagctggggcttgttgaaacccagcaggcgctggttgctaacggcttgcgtcacaagatccgtttgcaggtcgatggcggcctgaaaacgggtgtcgatatcatcaaggcggcgattctcggcgcagaaagcttcggcttcggcactggcccgatggtggcgctcggctgtaaatatctacgtatttgccatctgaacaactgcgcaacgggtgtagcaactcaggatgacaaactgcgtaagaaccactatcacggcctgccattcaaggtgacgaattactttgagtttatcgcccgtgaaacccgcgagctgatggcacagcttggcgtaacacgtctggtggatctgattggtcgcaccgacctgctgaaagagctggacggtttcaccgccaaacagcagaagctggcgctgagcaagctgctggagactgccgaaccgcatccaggtaaggcactctactgcaccgaaaacaacccgccgtttgataacggcctgctgaacgcgcagttgctgcaacaggcgaaaccgtttgtcgatgagcgccagagcaaaaccttctggttcgatattcgcaacaccgaccgttctgtcggcgcgagccttagtggctatatcgcccagacgcacggcgatcaggggctggcagccgatcctatcaaagcgtacttcaacggcaccgcaggccagagcttcggcgtgtggaacgcgggcggcgtggaactgtacctgaccggtgatgccaacgactatgtcggtaaaggcatggcgggcggcttaatcgccattcgtcctccggttggttccgccttccgcagccatgaagcaagcattatcggcaacacctgcctgtatggcgcgaccggtggtcgtctgtatgccgcaggccgcgcgggtgaacgtttcggcgtgcgtaactccggtgctatcaccgtggtagaaggcattggcgacaacggttgtgaatatatgacgggtggtatcgtctgcattctgggtaaaaccggcgttaacttcggtgcgggcatgaccggcggtttcgcttacgttctcgatgaaagcggcgatttccgcaaacgcgttaacccggaactggtcgaggtcttaagcgttgacgctctggcgatccatgaagagcatctgcgtggtcttatcaccgagcatgtgcagcataccggctctcagcgcggtgaagagattctggcgaactggagtaccttcgccactaaatttgcgctggttaaaccgaagtccagtgatgtaaaagcactgctgggtcaccgtagtcgtagcgcagctgagttgcgcgtgcaggcgcagtaaggggtagcaacaatgagtcagaatgtttatcaatttatcgacctgcagcgcgttgatccgccaaagaaaccgctgaagatccgcaaaattgagtttgttgaaatttacgagccgttttccgaaggccaggccaaagcgcaggctgaccgctgcctgagctgcggcaacccatactgcgagtggaaatgcccggtacacaactacatcccgaactggctgaagctcgccaacgaggggcgtatttttgaagcggcggaactgagccaccagaccaacaccctgccggaagtttgcggacgagtctgcccgcaagaccgtctgtgcgaaggttcctgcactctgaacgatgagtttggcgcggtgaccatcggcaacattgagcgctatatcaacgataaagcgttcgagatgggctggcgtccggatatgtctggtgtgaaacagaccggtaaaaaagtggcgattatcggcgcaggcccggcaggtctggcgtgtgcggatgtcctgacgcgtaacggcgtaaaagccgttgtcttcgaccgtcatccagaaattggcgggctgctgaccttcggtattccggccttcaagctggaaaaagaggtaatgacgcgtcgccgtgaaatcttcaccggcatgggtattgaattcaaactcaataccgaagtgggccgcgacgtacagctggacgatctgctgagtgattacgatgccgtgttccttggcgtcgggacttatcagagtatgcgcggcgggctggaaaacgaagacgccgatggcgtgtacgcagcgctgccgttcctcatcgccaacaccaaacagttaatgggctttggtgaaacccgcgacgaaccgttcgtcagcatggaaggcaaacgcgtggtggtccttggcggtggcgacactgcgatggactgcgtgcgtacgtccgtgcgccagggagcgaagcacgttacctgtgcctatcgtcgtgatgaagagaacatgccgggttcccgccgcgaagtgaaaaacgcgcgggaagaaggcgtagagttcaaattcaacgtccagccgctgggtattgaagtgaacggtaacggcaaagtcagcggcgtaaaaatggtgcgtaccgaaatgggcgaaccggacgccaaaggccgtcgccgcgcggagatcgttgcaggttccgaacatatcgttccggcagatgcggtgatcatggcgtttggtttccgtccacacaacatggaatggctggcaaaacacagcgtcgagctggatagtcaaggccgcatcatcgccccggaaggcagcgacaacgccttccagaccagcaacccgaaaatctttgctggcggcgatatcgtccgtggttccgatctggtggtgaccgctattgccgaaggtcgtaaggcggcagacggtattatgaactggctggaagtttaagcgaggtaacaatgaattcgccagactgtgtctggcgaatcaaattactgacgaagtgcgcgttgttttctggcaaatgcggcatgagcgtttgacctttcctataatagggataattttcaataaattgtgctttgttcaccaagtctgatgagtgaagcacatcaagcaatttctcatttacaatccgtctcaattacttgttaacacctctgacaataccgattctgcaagctattcagtcttttcattccatgtaaattgtctcgatattaatatacaaaatatgaatataaaaaaccaatatattatccttaattatctatatattttcctatttttcagcgcaaacattcatgtaatgaataattatcaccacaaaccacctcaccagcaccttattattcacatgatcgtaactataaaattcattaaataaatacatcccagcaagttggctatttctgaacgagttatttatttacattcacaaacagatatatatactgcttcagctttttattttaaaaaataaatttgttattaaggatatgttcatatgtttttcaaaaagaacctcacaacagctgctatttgtgcagcactttctgttgcagcattcagtgccatggcaacagatagtactgatacagaattaactatcatcggcgagtatacccctggtgcatgtaccccagttgttacgggcggcggcattgttgactatgggaaacatcataacagtgcgctgaatccgaccggtaaaagtaataaactggttcaactgggccgcaaaaacagcacattaaatataacctgcacagcaccaacgctaattgctgtaacctccaaggataaccgtcagagcaccattgtagcgttaaacgacacatcctatattgaaaaagcttatgatactctcgtagatatgaagggaacgaaaaacgcctttggtttaggttctgcgcctaatggacaaaaaattggcgctgcatccattggtattgacaggtctaatggtgggattcacgcggcggacgatacaggtgaaattcctgtcgacctgattcaaactgaccactggagtgcagcgacccccacatggaaagccagttctaatggcgcattctgcagcctgacaagttgcagtgcaatcgagcgcggttattctgttgcaaaaacaggggaactgacacctgttgctattacagcggtcaccttcccgttactgattgatgctgcggtaaatgacaatactattcttggttctgatgaaacgatcaaactggatggtaacgtcactatcagcgttcagtatttataagaacttgtaatacagtttttatttttacgcattaaccagttagctataactcggacagattatgccctatgacatggtctgtcttaatcaatctcatcgcaaacagtgcataacatatattaacaatatgtttctgcgttatttatcattattacaggagttttaatttaaatgctcagacacattacattcactgtatttataacaacatcaatgaatactaacaatgccggacaggagtactatcaggcattcgttttatacgatcggttaatgtttcaggaaagctcttcgcatatcttggggaaagtaaatgtaatacgctgttcttaattgttcagtgctcaccccccagagtatagctcattccattattcaacttagctccatataaagggacagataatggaaagcctcagtgaaggaaccacagcaggctaccagcaaatccacgacggtattattcatctggtcgatagcgcccggacggaaacggtacgtagcgttaacgcgttaatgaccgcgacgtaccaggaaattggccgacgaattgtcgaatttgaacaaggtggcgaggccagggctgcgtatggtgcgcagctaatcaagcgactaagtaaggatttatgtctaaggtataagcgtgggttctctgcaaaaaacttacgccaaatgaggcttttttacctcttttttcaacatgttgaaattcaccagacaatgtctggcgaattaacaccattgggaattccgcagacaccgtctgcagaattcccaagcgcaaagatttggcagacgctgtctgccaaatctttccccttgcccaggtccacctacgtccgtttactttccgttaaaaacgctgacgcccgcagcttttatgaaaaagagacgctccgctgtggctggtctgttcgccagctagagcggcaaattgcgacccagttttatgagcggacactactgagtcatgacaaaagtgccatgctgcaacaacacgctcctgccgagacgcatattcttccgcaacaggcgatacgcgatccctttgtgctcgaatttctggaattgaaagatgaatatagtgaatccgattttgaggaggcgctgatcaaccacctgatggatttcatgctggaacttggggatgattttgcctttgttggtcggcagcgaaggttacgcattgatgacaactggtttcgtgtcgatctgctgtttttccaccgccgtttacgctgcctgctaatcgtcgatctaaaagtgggcaaattcagctatagcgatgccggacagatgaatatgtatctcaactacgccaaagagcactggacgctaccggatgaaaatccgcccatcggtctggttctctgtgcagagaaaggagccggagaagcgcattatgctctggcaggtttgcctaacaccgttctggcaagcgaatataagatgcaactacctgatgagaaacgactcgcagatgaactcgttcgaacacaggcggtgctagaggaaggctatagacgccgttaatttcagcggtttcgaattctgcagacagtgtctgcagaatctttaaaacgaactaagttttaagccattaaatcagccttaaccttcaccacaacctttttaatctctccaggctcgccgacaacgcatcctggtttatgcggttcacctggcataaacacggcgaacattcccggttttaagatgatggcttgctcgttatcaatggtgctgcaaagctgataatcatcctcatggtggaactcttcacactgacgcgcagtgcctgccatgccaaacagaatccgttcctcaccgtttaataacagctggatatcaatgtattgctcgtgcaattccgcttttttctcgacggggctttgagtgttaaacgtcatgacattcataaagatattgtcgccctgtaattcgtaacgacccggcgctttttcttgcggtctggcagctaatgccagcgttaacgcgtcctgtaacgcaggatgtaacccagcagacggtaaactctgtacttcacccatcatcataatttttctccctgggccaacagcgcagccccaagtaaacctgcatcatggcggtaatgcgccgccagtaaatcaacatgaaatgccgctggctcctgcgccagatacgtttccaccagcgccagatacccttctgccagaccaacgctgccaccgaccaccacgcactggcaatcagttgtggctttaatatcagcgatcagccttgcaagcgtacgtgcggagcggtgaatcagctgctgcgcctgctcgtcaccctgcccggcgcgcgtgaaaatagttttcgcatccgcgccagccaactccccctgcgctgccgctgcaatgccgcgaccagaagcaatcgcttccacgcaacctgtgcgtccacagccgcagactgggccgtgtggatcggcaagcgtatgcccgatatgccccgccagaccgccagggccggtaagcagtttgcagccgctcactacaccgccgccaacgccggtggaaacggtgataaagaccatatcggttatatcgccatccagcgcctgaaactccgcccatgctgcggcctgcgcgtcgttaatggcaatggtcggcaaattggtaagttgttccagcgttttgactaacggaaagtgtagcaatccaccaagattatgcggattaagcgccagcaagctgccgtcacggattatcccggtgctagcgatggcaacccgctgcgcatgagcttgcaacggagagactaatgcggataaggcatcacgcaaggcttctggtgtctggctggctggcgtaggaagttcacgacgatcgcggatctgcccgtcagcgccaatcagcgcggcggcaagtttagtaccgccgatatcaatcgccagtgtggtcatagcaccgcctttttcatcgctgtgttgtaccactgacaaatgtgctcaagacgcgtgattgcagaaccgaccgtcaccgcccacgcgccgtggcgcatcgcatccgccgcctgagcaggcgtgttgtaacgcccttcggcaatcacccgacatccggcgtcgctcaacgttttcaccagcgccagatccggctcttctggcgtttcaggcgtggtatagccagaaagcgtagtgccaataatttcggctcccagcttttggcatgccaggccgtcttccggcgtactgcagtcggtcatcgccagtaaaccgtgatggtgaatacgtgccagcagcgtttcaacaggcaccggacgcgggcggtcggtgccgtcaatggcgataatgtccgcgcccgcctgcgccagcgcatcaacatcttcaatataggccgtgatgcgtaccggagaatcctccagatcgcgtttcacaattccaataatcggcacgctcaccaccgcacgcgtggcttgcagatttgccacaccttcaatgcgaatggcaaccgcgcccgcctgttctgccgctaatgccatggcggcgacgatttcgggtttatcgagcgggctgtccggaaccggctggcaggagacaatcaggccaccgttagcagcgattttttgatccagttgtgcaagtaagctcatacatcttcccttagcgaaaggcccggtacatagaccgggcaacaggattaacttttggttttgactaaatcgtttttggcgctgccaaacggcacggcaccgctgaatggtttaccgtcgatagcgtcatgagtacgcaacgcttccgggcgcaaccaacgctgaacgcgagaaggcatatccagcccaatcagcaggatcaccacgaacgtcagactgaagctgaggcttgccagcgcagtacccagatccagacgttgagcgatcaacgcgccgatgattggggccagtgcaccgcccaatgcgccaacgttgtaggtaaagcccaggcccgctgcacgctggtcggtatcgaaataaccgccaatcagttttggtaagatcccggcgatcccttgtccaagcatttgctggaagaacagtaacagaccgagcacccagacgtttgcgccgccaatcgcaaataccggaataatcagcagctggctggccagcaggctacaaacgtacgctttgcgggttcccagccagtcaccgaggaagccacctacgcagcatcccaccgccgcgccaaagccactaaagaacagcacattggctacagtatgcgggttataagccagatcggttttcagatacgttggcagcagcgcctgaatcggccaactgtagaggaaagcaaacaacacgaccaccatcagcattacgcccgttggccagcgtttgcctgcactctgcaccataaagctgataaagattgcggcgcataacagcccaagaacagcgacgatcgcggcattttgcaggttaccggcgaagcagaaccacagcgcagtagccgccgccagtgtcattacgatattggcaatgcgatgttcaccacggtagagaatatccaccattgtgcgtactggtgctttacctgcgtgtttctctttccagtcttccgcttccgggatgtttttacgcagccagagagcaaagatgattggcaaaatgccgataaagaacagcgcacgccagccccagaccggaaccaccaggctatagacctgagcggcaacgacggcccccacagagaagccactaatcaaaaaaccactggctttgttacgcagatgttttggccagctttcaatgacataggtggcgctggaaccgtattcacccgccatccccatgccgatgaccagacgagcgataaacatggtgatgtagcctggcgcaaagccgcaggccagcgtcccggcgctgaagagaacgatgctggtgaccattgccagacgacgcccgtagcggtcacccatagcgccgagcatcaggccgccgaaccagcgagagataaaggctgcagagatcagacttgccgcctgcaccgtcgtcagcccgaattcaccttgtacttcggtgagtaccagggcgattaaaacgaaatcaaaaccgtcaagcagatatcccaaccaggcagcggaaaatgcgcgccattgtgcacggttgagatggcgataccacgggatattctgggttgtagtactcattgtgagtctcccgcggtgggcgatgcccacacgctttggtatgaaaattgtagggtacagatgcgtttatttcccctcacccggtaggggcgagcgaggggaaacaactcacccgcgctcttgcatcaactgctgggccagcgccttcagttctggcagatatttttcatctaccggtccaaacggtttgcggcacagcggcacagaaacgacatccatataatggaggacagttttcaggccgcggaatacgcccgttttgatcagtaaatcaatgactttattgcattcagtttgcagtttctgcgcggtctggatatcgccttctttcagcgccttaacgatcccctgatagcgccagcccatgatgttgtaggtactgccgataccaccatcagcgcccgccagcagaccagaggcgaagatttcgtcgtaaccgttatagagcacaagatcaggatgttcacgacggatctgctccatctgatagagatcgccagaggtctgtttcagcgcacctacgccaggcaatgtaacaagtgtgttgatctgatccagggtcagttttaccccactcagggctggaatgttgtacaccaccatcggcaaaccatccgcgctatcaataattgcccgatagtgatcgcagtgttcttcaaagctgaaaggatagtagaacggcgtgacggcggagacggcatcgaagccataacgtttagcgcttgccgcaagttgttggctttcggcggtgctgacgcaaccgacgtgggcgatgagtttaatcttacctttcgcctcttcggcgacgatttccagtacctgttcacgctcggaaaggctttgtacaaaggcctcgccggtgctaccacccacgtataaaccgtcgatgccctgctgaatattgaactgaaccaggcgacgcagactcgctttatccagtgcttgttgttggtcaaaaggagtcaggagtgcagccattacgccacgtaaattcgttgccataaatacctctgaagtgatgcttgtctgataaacgatatacctttatacctgttataccagatcaattaagcaacaccccatacagaaagcttataatgcgatctgcttcactaaagtggcattatttctttttgttggtggtctgaccgaaagcgtgccaggtagcagagacgctgttgagatggctttgcaacgcacgatcggcttcgtcaggatcatgacggcggatcgcatcaacgatcgcaatatgctgttgataactaacgttgttatgttcgtgcagtgcctgatcggtaaccgttgggcgtgcggcaataagccagtcgagcagggcaacgtggatcgccatgaagattgggttaccggggatctccgccagcacgcggtggaaatcaacgtcactacgaatgaatgccgcgttgttatccaggctctgactgttgatttccagtgcttttgccagcaaatcgatttgctcatcggtggcatgttcagccgcatagcgcaccagactggattcaaagaacagacgtaattgttcgaaatgggcaatcccaccgggatgagaaaggaaatctttcgccatgccggaaagctcaccgatgatagtgtccgcagaaggacggctgacgcgagcgcgttcgccgttgtttatttgcaccagacctttgcgttttaacgctgccagcgcttcacgcacgctaggacgcccgacgttaaagaacgccatcagttcgcgttcagacggtaattgttcaccttcgccaaattcacgacggcggatcatctgttccagctcttcttccaccatttcggagagttttttacgcgccagcgggcggctacgcaagttgcgaccaattgcaggactagaatcttcggtttggctatcaaatgcgttcataaggcccattctgtaaggtcagtgtgattaacatcatcagtgacatcctatcacaggattgaaagtaggggaaaatggcagggttttctctttgtgcctcatcattaccataattaacggaataattaactattgcgaaaaattaatgtaacgcagataaaaacatcccgtttgaattatttataagactattcacgagcattatgaatattatgaatgtgttcttacaaaataatcataagcgcatattttttaatgaaaaatcacctcacctacaattaaaaacacgacatccgcaccataaatagccttgcaaaaaatataacatcgttgttttcaatctgccgtttatgggattgaccgttttcttttgacacggagttcaacaatgttcggcataattatatctgtcatcgtattaattacgatgggctatttgatcctgaaaaactacaaacctcaggtggtgctggctgccgcaggtatcttcctgatgatgtgcggtgtctggttagggttcggtggtgtactcgatcccaccaaaagcagcggctacttgatcgtcgatatttataatgaaatcctgcgcatgctgtccaaccgcattgccggattggggctgagcattatggcggtgggcggttatgcccgctacatggagcgcataggggccagtcgcgcgatggtgagcttgttaagccgcccgttaaaactcattcgcagcccgtatattattctgagcgcaacttacgtcatcggccaaatcatggcgcagtttattaccagcgcctccggtctgggtatgttgctgatggtcaccttatttccgacgctggtgagtctgggagtaagtcgtctctctgcggtggcagttatcgcaaccacgatgtccattgagtgggggattctggaaacgaactccatttttgctgcccaggtagcgggaatgaaaattgccacatacttcttccactaccagcttccggtcgcctcttgcgtcattatcagcgtggcgatctcccactttttcgtgcaacgcgcttttgacaaaaaagataaaaatatcaatcacgaacaggcagagcaaaaagctctcgataatgtcccgccgctctattacgccattttacctgtgatgccgttaatcctgatgctcggcagcctgttcctcgcccacgtcgggctgatgcagagtgaactgcatctggtggtggtgatgttactgagtttgactgtgacgatgtttgttgagttcttccgcaagcataacttgcgcgaaacaatggacgatgtgcaggcgttttttgacggcatgggtacgcagtttgccaacgtggtaacgctggtggtcgcgggtgaaatatttgcgaaaggcttaacgacgattggcactgtcgatgcggttatcaggggggcggagcattctggtctgggcggtattggcgtgatgattattatggcgctggtcattgccatttgtgccattgtgatgggctctggcaatgcgccgtttatgagttttgccagtcttattccgaatatcgcagccggactacatgtaccagcggttgtaatgattatgccgatgcattttgccacgacgctagcgcgcgcggttagcccgattactgcggtggtggtcgttacgagtggaattgcaggcgttagcccttttgcggtggtgaagcggacagcgatccccatggcagtcggtttcgtggtgaatatgattgccacaatcacgctattttattaagtcattaaaaagacaaaacaggccgcctgggcctgttttgtattacttcacaacgcgtaatgccggtcgaccaccgcgtggtggctgcggaggttcatcgtcaggatgagtgtcatcatcgtgatctggcttgtcgccatcaataacgctcataacggtttcgttgtctgcgcttgcctcttcatcattcatgatgctggtatcttcatcgtaggcagcttcaggctcaaacatcgtgcctgcgccattttcacgggcgtagatagccagcacggcagccagcggcacagaaacctgacgcggaatgccaccaaagcgcgcgttaaagcgcacctcatcattcgccagttccagattgccgacagcacgcggcgcaatgttgagtacgatttgcccgtcacgcgcatattccataggaacctgcacgccagggagcgtcacatccaccaccaggtgcggcgtgagctggttatccagcaaccactcatagaatgcacgcagcagatagggacgacgtggtgttagctgactcaaatccatacagattaactccggcccagacgcatttcacgttctgcttcagttaaagaagcaaggaaagagtcacgctcaaagacgcgggtcatatagcctttcagctctttcgcacccgggccgctgaactcgatgcccagttgcggcagacgccacagcagcggagcaagatagcaatcgaccaggctgaactcatcgctcaggaagtacggcttctgaccgaagaccggcgcaatcgccagcagttcttcgcgcagttgcttacgtgcggcatctgcttcagaagcactaccgttgatgatggtgttcatcagcgtgtaccagtctttttcgatgcgatgcatgtacagacggctttcaccgcgagctaccgggtaaacaggcatcagtggcggatgcgggaaacgctcatccagatattccataatgatgcgagattcccacagggtcagctcacgatccaccagggtcggaacgctctgattcgggttgaggtcaatcagatcctgaggcggattgtccttttccacgtgttcgatctcgaaacttacacctttctcagccagcacaatgcggacctgatggctatagatgtcagtaggaccggaaaacagcgtcattacgctacgtttgttggcagcgacagccatgaaaacctccaggtatagtcagaatttttactgctaccagccaccaggtggccagtcagaagttgtgttacccaataaggaacgactctctttgttcgaaaatcaaacaaaaaatgagcaatacccgacatttgggcagaaaattggatgatagtttaccagattttgcgaccattgtggtgagtcgatgccggaaatggggaaaaagagatgcgctttagtctgaaatagttgacttagtcccttattggcgatgtggtttttgttttacctgtctgtcaggtggcagcaaaaagcaactttccagtttttacgctgattcagattttagctataaaaaaacccgccgaagcgggttttttcgaaaattgttttctgccggagcagaagccaattaacgtttggagaactgcggacgacgacgtgctttacgcagaccgactttcttacgttcaacctgacgagcgtcacgagtaacgaagccagctttacgcagttcagaacgcagggactcgtcgtattccatcagagcgcgggtgataccgtgacggatcgcaccagcctgaccagagataccaccacctttaacggtgatgtacaggtccagtttctcaaccatgtcgaccagttccagcggctgacgaactaccatgcgggcagtttcacgaccgaagtactgttccagagaacgttggttgattacgattttaccgttgcccggtttgatgaaaacgcgagctgcggaacttttgcggcgaccagtgccgtagtattgattttcagccattgcctataatcccgattagatgtcaagaacttgcggttgctgtgccgcgtggttgtgctcgttacccgcgtaaactttcagtttacggaacatagcacgacccagcgggccttttggcaacatgcctttaaccgcgatttcaatcacacgctcaggacggcgagcaatcatctcttcaaaggtcgcttgtttgataccaccgatgtggccggtgtggtgatagtacactttgtcagtacgcttgttgccggttacagcaactttgtcagcgttcagaacgatgatgtaatcaccggtatctacgtgcggagtgtattccgctttgtgcttaccgcgcaggcgacgagccagttcagtagccagacggcccagagttttaccggtcgcgtcaacaacataccagtcgcgttttacggtttctggtttagctgtaaaagttttcattaaaagcttacccaataaatagttacacgttggtgaacacccaaacgtcttcaattgttgaggttcacacgacaaagtccggcaaacctaccccttcgaatagcctatgccagcacacaaaaagttttgggaaaaaaactttcttgtaacgtggggtcgcaggattatagagaagtcggggtcaaagatcgacccctttttgtgatttgtgacaggttttaacccgccaaatgctcgcgcttcagatactcttcgctttgcatctcttgcagacgactcaggcaacgctggaactcaaacttcagccgatcgccctgataaatttcatacagcggcacttctgcactcaccactaatttgacatggcgctcgtaaaactcatccaccagcgcaataaagcgccgcgcttcgctctccatcaaccgcgtcataactggtacatcaaacaacatgaccgtatgaaagagacgactgagcgcaatatagtcatgctgactgcgggcgtcgacgcacagcgtagtaaaagagaccgccagcgtctggttctcgacgcccattgttgctaatggccgatggttgatttctaacgtcggactattttctcgtttcccccccgccagcgccaaccatagtttatccatttgcgcccgggtttcatcgtgaagtgggctaagccacagatgcgcctgagtgagtgtacgcagacgataatcaacaccagcgtccacgttcattacatcacaatgctgtttaatggcatcgattgcaggcagaaaacgcgcacgttgcaggccatttcgataaagttcatccggcggaatattactcgtcgctaccagggtaataccgcgagcgaacagggctttcatcagaccgccaagtagcatggcatcggtaatatcagaaacaaaaaattcgtcaaaacagagcacgtcagtttcggctttaaagcgatcggcaataatttccagcggatcggtctgcccctgtaaggcagttagctcttcatgcacccgcagcataaaacggtgaaagtgcaggcgctgtttccgctctcccggcaggctttgatagaaaaggtccatcagccaggttttcccgcgtcctacaccgccccacatatataagccacgcactggcgtatgctttgtgtcttcgcgtttaccccacagcttaccgacccgcgccattagcccactcgtcctgggggctggtggcgtgctattgatgagttcctgataaataatttccaggcggctgacggcctctttttgaacgtcgtcgggttgatggctgccttcattaagcgccttcaggtattggcttgttggggtaacgctttgcatgatcttattgttattccttgaataatcggtgcgccgttgttcacggttgacgaaaaaaaggccgttctacactacgcgatatgcagtcgggattccacttctgtggaattaacggttatagtggcataatcagccgcaggcatggagcctgaagccaacaccctacggaaacaaaagacaacgggagatgttcatgacctgggaatatgcgctaattgggttagtcgtcggcatcattattggtgctgtggccatgcgttttggtaatcgtaaactacgccagcaacaggcgttgcagtacgaactggaaaagaataaagctgaactggacgagtatcgcgaagagctggttagccactttgcccgcagcgcggaattactggataccatggcgcacgactatcgccagctgtatcagcacatggcaaaaagctccagcagcctgctgccggaactgtctgctgaagcaaacccgttccgtaatcgtctggcagagtctgaagccagcaacgatcaggcaccggtgcagatgcctcgcgactattctgaaggcgcatccggcctgctgcgtactggcgcgaagcgcgactaatttatttttcgggcgcagccattgcgccctcctcttctctccctccccgactatcatttaatctggtgtctcattgttagccgtctgaaaattcaataacatcaaactgttttgaatctcttttcttatcattcaggtacgagagcaggaataatgaaaaaacaaacccagctgttgagtgcattagcgttaagtgtcgggttaactctcagcgcgagttttcaggccgtcgcgagcattccaggccaggttgccgatcaggcccctctccccagtctggctccaatgctggaaaaagtgcttccggcagtggtgagcgtacgggtggaaggaacggccagtcagggacagaaaatcccggaagaattcaaaaagttttttggtgatgatttaccggatcaacctgcacaacccttcgaaggtttaggctccggtgtcatcatcaacgccagtaaaggctatgtgctgaccaacaaccatgtgattaatcaggcacagaaaatcagtattcagctcaatgatgggcgcgagtttgatgcaaaactgattggtagcgatgaccagagcgatatcgccctgttacaaattcaaaacccgagcaaattaacgcaaatcgctattgccgactccgataaattgcgcgtcggtgattttgccgtagcggtcggtaacccatttggccttgggcaaaccgccacctctggcattgtttccgcattaggccgcagcgggttgaatcttgaaggtctggaaaactttatccagacagatgcttccattaaccgcggtaactccggcggtgcactattaaaccttaacggtgagttaattggcatcaacactgcaatccttgcgcctggcggcgggagcgtcgggattggatttgccatccccagtaatatggcgcgaacactggcgcagcagcttatcgactttggtgaaatcaaacgcggtttgttaggcatcaaaggcaccgagatgagtgccgatatcgccaaagccttcaaccttgacgtgcagcgtggcgcgtttgtcagcgaagtgttgccaggttctggcagcgcaaaagcgggcgtcaaagcgggcgatattattaccagcctcaacggcaaaccgctgaatagctttgctgagttgcgctctcgtatcgcgaccaccgagccgggcacgaaagtgaagcttggcctgctgcgtaacggcaaaccactggaagtagaagtgacgctcgataccagcacctctagcagcgccagcgctgaaatgatcacgccagcgctggaaggtgcaacgttgagcgatggtcagctaaaagatggcggcaaaggtattaaaatcgatgaagttgtcaaaggaagcccagctgctcaggctggcttgcaaaaagacgatgtgatcattggcgtcaaccgcgatcgggtgaacagcattgctgaaatgcgtaaagtgctggcggcaaaaccggccatcatcgccctgcaaattgtacgcggcaatgaaagcatctatctgctgatgcgttaatgtcgtaaaccgggcatcaggcttacgtgtgatgtccggttaactcgtggtatgctgctgccgttcccttttttaatgacgcctccatcatgtttgtgaagctcttacgttccgttgcgattggattaattgtcggcgctattctgctggttgccatgcctagcctgcgcagccttaacccgctttccactccgcaatttgacagtaccgatgagacgcctgccagctataatctggcggttcgccgcgccgcgccagcggtggttaacgtttacaaccgtggtttgaacaccaactctcacaaccagcttgagatccgcaccctgggatccggtgtaatcatggatcaacgcggttatatcatcaccaataaacacgtcatcaacgacgccgatcagatcatcgtcgccttacaggatggacgtgtatttgaagcattgctggtgggatctgactctctaaccgatctggcggtacttaaaattaatgccactggcggtttacctaccattccaattaatgcacgtcgcgtaccgcacattggcgacgtagtactggcgatcggtaacccgtacaacctcgggcagaccattacccaggggattattagtgccacgggtcgaatcggtctgaacccgaccgggcggcaaaacttcctccaaaccgatgcttccattaaccacggtaactctggcggcgcgctggtgaacagcctgggcgaactgatgggcattaatacgctgagctttgataagagtaacgatggcgaaacgccggaaggtatcggctttgcgattcctttccagttagcaaccaaaattatggataagctgatccgcgatggtcgcgtgatccgcggctacattggtatcggcggacgtgagatcgcaccactgcacgcgcagggcggtggtatagatcaactgcaagggatcgtggttaatgaagtgagtcctgacggcccggcggcgaatgcgggtattcaggtcaacgatctgattattagcgtggataacaaaccggccatctctgctctggagacgatggatcaggtggcggaaattcgccctggtagcgtgatccctgtagtagtgatgcgtgatgataagcagttaacgctgcaggtcaccattcaggaatatccggcaaccaattaagtcgtgcgctcaaaacaaaaaaccggagtctgtgctccggttttttattatccgctaatcaattacttattaacgaactcttcgcccagggcgatatctttcttcagcgtatccagcataccttccagcgcgttctgttcaaatgcgctcagggtaccgatagatttacgctcttccacgccgtttttacccagcagcagcggttgagagaagaaacgggcgtactgaccgtcgccttcaacgtaggcacattcgacaacgccttgttcgccctgcagtgcacgaaccagagacagaccaaaacgtgcagctgcctggcccatagacagggttgcagacccgccaccggccttcgcttcaaccacttcagtacccgcgttctggatgcgtttggtcagatcagccacttcctgctcggtaaaactaacgccaggaacctgactcagcagcggcagaatggtaacaccagagtgaccgccaataaccggcacttcaacttcgcctggctgtttgcctttcagttccgcaacaaaggtgttggaacgaatgatatccagcgtggtaacgccgaacagtttgtttttgtcataaacaccggcttttttcagcacttcagcagcaattgcaactgtggtgttaaccgggttagtgataataccaatgcacgctttcgggcaggttttcgcaacttgctgtaccaggtttttcacgatgccggcgttaacgttaaacaggtcggaacgatccatacccggtttacgcgctacgcctgcagagataagaacgacatctgcgccttccagcgccggagtcgcatcttcaccagaaaaacctttgattttcacagcagtagggatatggctcagatcgacagccacaccgggagtcactggagcgatatcatacagagagagttcactaccactaggcagttgggtttttaacagtagtgcaagcgcctggccaataccgccagcagcgccgaggactgcgactttcatcctaaactccttattatattgataaactaagatatgttgctccgctgccgcgaccttaatccacaaaattgccgtttacaatgaccacatctcaagaatgtgtagtcacgcaagtttagcgtttatgcatttaattgccgtaatcaggaacctaacttacgtaattaacagtcgcttatgcattagcgcaacattccaacaggtggtgacaatataccctaccgttcagccaaaacaacatcaatttgataacaattaatttacttttaagcagaatttgcatgccgtgacgcaggcatgtttctcaataacgaaatttgataaaatcccgctctttcataacattatttcagccttcttcagggctgactgtttgcataaaaattcatctgtatgcacaataatgttgtatcaaccaccatatcgggtgacttatgcgaagcagcgctaagcaagaagaactagttaaagcatttaaagcattacttaaagaagagaaatttagctcccagggcgaaatcgtcgccgcgttgcaggagcaaggctttgacaatattaatcagtctaaagtcagccggatgttgaccaagtttggtgctgtacgtacacgcaatgccaaaatggaaatggtttactgcctgccagctgaactgggtgtaccaaccacctccagtccattgaagaatctggtgctggatatcgactacaacgatgcagttgtcgtgattcataccagccctggcgcggcgcagttaattgctcgcctgctggacagtctgggcaaagcagaaggtattctgggcaccatcgctggcgatgacaccatctttaccacccctgctaacggtttcacagtcaaagacctgtacgaagcgattttagagctgttcgaccaggagctttaatctctgccccgtcgtttctgacggcggggaaaatgttgcttatccctctcaaccccctgctttcccctgcgattaatttaacgaatagtgcgttttactgcgacatgtcattcacacaatgaatacataaggtaaaaaaagcacattatgcaaaattcattatctaattgaaaaaactagaattaacgataaataaccgtatttttaattcttttttgttattaaaattcacatttttaacacttagtatcaactgaaacagttagcgcggtattaattagctcaataattagtgtatacttgattttgtgatatgggtcacgaaacaaaggcccagctaaaagattatgtcgaggtaaaaatcatgaaaatcaaaaccactgttgctgcattaagcgtactttctgttctctctttcggtgcattcgctgccgactccattgatgctgcacaagcacaaaatcgtgaagcaatcgggaccgtatccgtaagtggtgtggcgtctagcccaatggatatgcgtgaaatgctgaacaaaaaagcggaagagaaaggcgcaacggcctaccagattactgaagctcgtagcggtgacacctggcacgctacggctgaactgtacaaataaaccctcatcgtcttgtccgacgatattgcccccggttcgggggcttttttttgcgttaatgacgaacattaaaacgcaaatgcccttccagctcttcctctgcctcatcaaacagcaatattaacgcgccaaaacggcgacgcgttttctctcccagatgaacaaattcaatctcaagtggtagcggcaggacatcgttcattaacacatcccatagactgtcgagatcgcgtaccttatctttcgccagaccaaaggtttggctaaagtcacgataaaaatcctcctgactctcaatctcatcaaaatcaaaggtataaatattcatctgttgccaccgtcacgtttcgcggcgagttctgccgtgcatcgctaagtatagccatgaaaaaaccgacgcttttggcgtcggttttgacttaactatcggtcaacgcatgttgatacttatggagcatccccgccagccgatttaccggttccgtcacctgcggtggcgcttgccagatgcgtagcttttcctggtagatttccagttcttccagcaactggccaaagtaccgacgacgtttatcatcgctacgggcagatatcacatggtctgctgtgcggcgcatttgtcggtgaaacgcgcttaaatcctcgttaaccgggatcggtgcatcacgcaggcgctggtgcgcgataatcatcgtcagcgccaggcgaaatttcggcaaatcccctgggaacttattcatcagcaaaaacagctgctgataaagtgccgggaggtggttctctttacgacgtgccacattggtagtcatcgcggaaacagcggcagaaacaaactgattaagcagtacacgtccggtcctgtcgcggcttttatcccgcaccagcaaaataacggtgaacgcgagcacacagccgacgatttgccctaatgcgctgtcgagaaactgactgaaatggaaagtcatcgggttatccagcacgataatatttatggtgctggccagtgcccccatgctgcccagtcgccgtttctgtacttctataccgaggaagaatcccagcactgccaggctaatgcacagcagcaacatgctctgttgggtattagggataatcaccaaaaagtagagcagccctaacggcagcgcggccagcgtcccgtagataaagtcgatcgccaccatgcgtggattcggcaaacgcattgccagactcgtcactaccgcaatcatcaccattgcaccactgccggaagtccagcccgtccacagccagaaaagcgtgcccagaatgcaggaaagtgtggttcgccagaagttaaccattgcatgatgacgttcggcactctctacttttacttccggttcgccttgcaggatctcttcttcggtggcgttgatttttgtgttactgataacgccgcgcttgagaagctgataacgcgttgccgccgcgacccagctataaatggtgacaggcgtttcccgttccccggtccaggcgataactctccgcaggcgtttgagctgcttgtggacgtcctgcgcggtttctaccggcgtgtcaaaaaattcgcggaaagtatcagtgatcaattccgggcgcgtattctgaataagataagtttcgcaggattgggtaatcagcgtcaggcttagcgtattgatcgcttttaaacgtcgattggcccgcgcccagcgggaagattccatattcaggttgctgcgcatgccttgtagcgccgtggtgcgtcgcaccaggtcgccccaggctttatcgacaacttcaccatcgccatgcttgatacagagttgcattaattgatattgcgcgaccagcaaactttccagctctcgatccacttcttgtttgatgcttcgcggagaaaagagcaaatccgccataatcgcacacacaataccgataacgatctcgctacaacgttcgacggcaaactgcggcgtaagcaatggttccggctgaatggtgatcacaatgatcagcgcggtataaccggccagcccccacgcatagctgttttctattcgtaccaggctggatatccaggtacaaaaaccggcccagatacagcacaccagaatcatcaataatggtgcgcggatcatcgcaatgatgatcaccagtccggcaatacagccaataaatgtgccgatgatgcgcaaaaagccacgatagcgaatagcgccagaatacggttcacctcccgcagcaaaggccgtaccggcggcaacaatcgccgctgtcagtaccgcccagcgtggcgtttccagctggaagtgaaagccaacaaacagcgccagtacaatggcggtcgccagttttaccgcaaagcgaatatgttggttagcaatggagaaaatacccatcgtgattaaccaaactcacgcaggcgatgggccattttacggaagaagctatcctggctttcgtcgcgatcttgtttgccagtgaccaccactgtagcagtggtgcccgcaggccagatgttctcttgctggttgtcgagacgaatacgaaccggaacacgttgcgcaagacgcacccattcaaggttagagtctatagtcgccatccctttgtcgtcacgcgtgctgctggcgttggtgacccctgcggcaacactatcaacagtccctttcagcactttgttactgccaagcggcgtgatctctgcacgataccccggacgcaccccttccagcttagtttcttccatataggccagtacatagaaggagttctgtttcaccagcgcaaccgccgtacttcctcgagtaataaactcaccggtatagacgttgaggttggtcacccagccatctgctggcgcgcggatcaccgtgcgttcaagatccagttttgccagatcgcgggtcgcctgcgctttcgctaactgatgcagaaccgtttgtagtacgttgttggcctggtcgatctcttcgcgagacatcgcctgcacaccgagacggttacgacgtccggcctcctggcgtttctcctgtgccagtacctgataataagcaacatcggcttgcgcttcctcaagcgccttttgatagcgcggctggtcgatggtgaacagtatctgtccttttttcaccagctggttatcatgaacattcacctgggtaatgagtccagaaacgtccggcgcgatcgcaacgacgtcagcgctaaagcgcgcgtcacgcgtccagggggattcggtgtaatagacccaggcattaaaaattgcgatgaaggccagaatgactaatacgaccgtgatggccgtacgggagaattttcttattagtgttttcacttcaacctcaaacgaacagtcggcttatcaaataaaacaagcagcaatagagcgcggtgttgaacaacgccggatgccagacaaagtcgtagatacctgttggcacaagtacccggcgcaccagccagaaaatcgccagacttaaaagcaattcaaaaaatatcggtgggaaggacagcccaaacaccacgataacgggaaacagactcatgttgaccttggttgtaaagagagagcaggcgttattattttcagcatctgtcgccgcagagaagggcatggaaagccgggcgagagcaacattgctgtagattgatatttaatatattagcgtaactgttatgctgttatctatattatgtgatctaaatcacttttaagtcagagtgaataatggaacgactaaaacgcatgagcgtgtttgccaaagtagttgaatttggctcttttaccgccgccgccagacagctacagatgagcgttagctccatcagtcagacggtaagtaaactggaagatgagttgcaggtaaagctgttaaaccgtagcacacgcagcattggcctgaccgaagccggtagaatttactaccagggctgccgtcgtatgcttcatgaagtgcaggatgttcatgagcaactgtatgccttcaataacacccccatcgggacgctacgcattggctgttctagtactatggcacaaaatgttctcgccgggctgacagccaaaatgctgaaagaatacccaggtttgagcgtcaatctggttaccggaattccagcccccgacctgattgccgacggtctggatgtggtgatccgcgtcggcgcgttgcaggattccagcctgttttcccgccgtctgggcgcgatgccaatggtggtgtgcgccgcgaaaagctatctcacacaatacggcataccggaaaaacccgccgatttgagtagtcatagttggcttgaatacagcgtgcggcccgacaatgaatttgaactgatcgcaccggaagggatcagcactcgcctgatcccacaaggaagatttgtgactaatgatccgatgacgctggtgcgctggctgacggcgggtgccgggatcgcctacgtgccgctgatgtgggtgatcaacgagatcaatcgtggggagctggagatcctgctgccgcgttaccagagtgatccacgcccggtttatgcgttatataccgaaaaagataagctgccgctgaaggtacaggtcgtgatcaacagcctgacggattattttgttgaggtcggtaaattgtttcaggagatgcacgggcgcgggaaagagaagtaattcatattgtactgttacgttgtacaaacctgtgccaacgggttcccctcaccctaaccctcaccccaaaggggcgaggggaccgttcgtgcacgtagaaagattaattatccttctgaaaatagtgaaattattacgcagtaccgccaacagtcaggttatcgactttcaacgttggctggcccacgccaaccggcaaactttgcccttctttaccgcagacacccacgccgttatccagtttcaggtcgttgccaaccatgctaatctgctgcatggtttcgataccggaaccaatcaacgttgcgcctttcaccggcttcgttactttaccgttttcaatcagatatgcttcactagtggagaaaacgaatttgccggaggtgatatccacctgaccgccaccaaagttcggtgcatagataccgtactcaacggattcaataatttcctgcggggtgcttttacccggcagcatataggtgttggtcatacgcggcatgggcagatgggcgtaggattcacggcgaccgttgccagtcggcgtcatccccatcaaacgcgcgttgagtttatcctgcatgtagcctttcagaatgccgttctcaatcagcacgttgtactggcctggcgtaccttcgtcatcaatcgccacgctacctcggcgatcgaccatcgtgccatcatcaaccacggtacacagttcactagccaccagctccccgacctgtccactaaatacactagtgccacggcggttgaagtcgccttccagaccgtgaccaaccgcttcatgcaacagcacgcccggccaacctgcgccaagtactaccggcatggtgcccgctggtgcagcaacggcagaaagattgaccagcgccatacgcactgcttcttttgcccatgcatccgcacggacttcgccgtcgagatcggcaaggaagaattcataaccaaaacgaccgccgccgccactggcaccgcgttcgcgtttgccatcttcttcgacgagaacgctcacggaaagacgcaccagcggacggacatccgccgctagcgtgccgtcggtggccgcaaccaaaattaattcatagacaccactgaggctggcagtcacttcctgtacgcgcttgtccgcttcgcgggcaaccttatcgacgcgacgcaggatatccagcttctcttcacggctcatgctttgcagcggatctacgctggtatacaacgggctatgctctaccgcgcccagcgtctgtactttaccatcaccactatcacggacgatggtgcgcgccgcttgcgcactctgttccagcgccagcaggctgatttggtcagcgtaagcaaatccggttttttcaccgctgattgcacgcacaccaacgccctgatcgatgttgtaagaaccatctttaataatgcggtcttctaaaacccaggattcgtgatagctgctctgaaaatagagatcgccataatcaaggcgacgttcggccagttgaccgaggatcgcgaacaagtcctgatgtttcaggccgttcgccgctagcaattgttcacttaccaggttaagactcatcgtttttgctactcgttagttactgcagtagaggattttttacggctgccggatgcggcgtgaacgccctatccagcctacggttatgttccggtttgtaggcctgataagacgcacagcgtcgcatcaggcaacggctgtcggatgcggcgtaaacgccttatccgacctacggttatgttccgtttgtaggcctgataagacgcacagcgtcgcatcaggcaacggctgccggatgcggcgtaaacgccttatccgacctacggttatgttccgtttgtaggcctgataagacgcacagcgtcgcatcaggcaacggctgccggatgcggcgtgaacgccctatccgacctacggttatgttctggctcgttggcctttggcaacgattatcctatgagattggggcaattacgcgccctcgtcaaatcattgcgctttttctttacgcggttggcgcaacacttcgttgatttgcggatcgtccagcggaccgctaatgtgatagcgcaaaatggagactttgctccacagcggccccagcactttactggcggcaaacactgccgcgccaacaatggggttaaccgcaaaagccgcagccacgcccaccgtcgcagaaatctctggtgcgacaaccgcttccatattcaggtcgcgacgtaccagatttacgctccctttcatggcgatatccgcctccaggccatccaccagcgtgtcgtcggtgtgcataacgccgtctttaatccacgcggtgctgcgaatggagtcaaaatagaacccttcgccaaaagtgtctctgaaatcaaaacgcagcttacgcatcagggcatctacgctcaataagcgcagcaattgcccggcatgtccggtattgatttcggtaatttcgcctttacccagttgagtatgaatgatgccattcaacgtcgcttcatctggctgccagggtgctttgcgccagtgtaaatcgtaatccacattaaaactgctctggcgtatgggcgtcgtgacaccaaaaaattctgcggcggcatcaattttctgcccgcgcagttttcctttcaggctggtacgttcattccccggattattaacccattcaccatcggcagtaagccggctgaaaccagtatcaatcagtccattggtcagcgttaacgtatcgccagaaatggtgatatcactgtcaatgcgaccgaatttttgcccccagaaccagcactctgtgcatcgtatttgggcgtccggccagccacggaagttaatgcgctccgttgtcgggaaaggactactcggcgtactatcaccacgagttttcgccacgctcgggttgtaataaagatatttgatattcgccagccacggcgcgttattacgcatcgctagcgtggcgttgatttcacgcccttgcgcttcaaccagggtgccatttgccgtcggttggctaacaatactcaggttattccattgctgatttcccagactcaacataggcgtacgtaacgttatgtgttgtgggaaactcgctgcaccaccgacactctccgcagcgcctttctggaacagggccagccactcggcaccattcatcggcggcatattgagttcaacgccactttgttccggcaacggcgggagcgttttactgtctgccgcccaaatagcacgatcgagcgtcagcttttgaccgagcaaccagcggctattgaaatgattatccgcaccagcctgtccggttaattcaaagctgttgagattgccatcaaccttaacgtttaccgctagtggttcacccgcaggtttggctaacggactaggtaagtgactgctcacattctttagatcgccgttcagctctatgttataggtcgcaccagcatgataaggcagatcaatgcccactttaccatcccacgccacgctgccactcaatgcttcgttcaccgcttcaggcagaacgccggttttcgccggttgccagttaccgttgaggtttaccgctacctggtaggcttttgccccttctttggtggaaaaatccacgttcaacggctgattaaaccagcttgctgtcagtggttcactttgcagatcgctattgataaagctgaatttaccgctcaaatttttcagggtgctgtcgagtggtttgataaacagactgttattacgcagcgtcacttcacctttcgcggttaccagttcgccgttcagcgggatatcaagatgtaagcgagcattcacatcgccgtcgagctggagttcttgcagggtcgcacccagagaatctttcagcggtgtctcatcaaagtaagggccaacggctttacccggacctttaatgtcagcgtcaatcagcagtttttctttactgtagtcagggatcactgcggtaagattactcgcgcgcacgccgcccagattaacgccatcggttttcatccataaaccgtcgttaataaagtccagttcaatatcaaggttagttaatgcaggccagtccggctggaaggcaaacttcgcgttgcgcagcggcaccagcacttcaaactgaccttcgttgtgtttataggggaagagttgcggattgccaccataaaccagcgtcgcgttatccgcttcaccgccctgaatcgcgccacttaagtaatcaaccaggtctttacccatcaagttttccgggaaatagcgccaggcttgactaccatcatcggtactgatgccagccagaatacccagccagggttcatcgttagcaggttgcaggtaacgaaaaccgccgcgcgcatggacggctttggctttaacgtcaatattacgcccatccagctggaaacctttgttattgttcagccagcttatagttgcctggccgtcggcgatttctagtggcgcacggaataccgtttcgtaaggcatctttgcctgcttcatgctcgcggtaagcaaaccattttcaacgctgccggaaagcgtcccggagaagtgttccgcacccggtaataatttccattgcttccaggccagatcgctccagcttgcctgaaaacgggtcttgtctgccgcctgaagcgggatatccagcgccagagtgttaatcttgccgctcggttgtgtggagcgccaaacatcacccagtgcaggactaagtttcgcggccagcgggcgtatgccctccaggcctgccagctccagattactggcgcgaatccggagttcgtcactgcgtttattgtctttgccgccaacgtcctgttccggtatccaggccagcgtcaatgctccgctcggccagggtttgccgtccatcgtgatccgtgtatcgggaatagagaactgccagcccggattttcacgcgtaatatgcgcggtcagattatccacgctcagcgtatgcgtttgcttctcgcccaaccagctggcaccgccctgtttcagccagacgtcaccgccggttacatcgcctttgtcgatcgtcatccagccttcaagggagaactgtgccgtttccagcgcaatattgtcctgcatccatttaccgagccacggcttcaggtcgatgtcatccgcctggagccagacgcgaccattgcttaacaacccctcatcatcgcgcaaatccatgcgcacctgcatcacgccgtgctgtccggtaaggctggagaggcttaccaggccttccgcacggtgtcgacgtggatcgttcagccaggtgagttgtgggatcgccagctcggcgcgctgaccggatggcgtcaggaaactgacttcactgtcgcgaagatcgaaatggtcaaattgacgaagaaacagatcgctgatgtgactggcttccagactgtcatcactaccaccgctggtgataggagtgttggtgcgaaagcgcagctgccagaaagtgaggtcgcgaaactgccagcgcatatgtaacaggctctgccagacatccagcgccagagtaacgcgtttaacgctaaattcgccgccatcttttagttctgcacggatgtcgtgtgcttcaagcgtcgggccaaaattctgccagctggcactgagctgactggcttctaccggcatgccagtcgcggattctattttgttgaggatttccggacgccaggcgtcaagatgcggtaaagcaatacgcaggccgctaaccagcagggcagcgatcacaacgagcgcggctccagtaagcagtaaaatccccggcaatcgcctcacccgtcactccttgtctgctaaaaatgtgactcaaaaaccctttgccggatggcggcccagcatctgtttacatcattacgacgtcaaactgctcctggttatagagcggttcaatttgtactttaacctgtttgccaacgaaaatttccacttccgccaggctgtgactctcttcgcctttcaaggcttcagctactgccggagaagcatagaccaggaaacggtcggagtcgtaagcatggtggacacgaacaatctcgcgcatgatttcatagcataccgtttccacggttttcaccgttccgcgaccgtggcaggttgggcattcgttacacagtacgtgctcaatgctttcgcgggtgcgtttacgcgtcatctccaccagccccagcgcgctaaaaccattaacgctggttttcacccggtctttgctcaacgcctgctccaggctgtgcagcactcggcggcggtgatcttcattattcatatcgatgaaatcaataatgataatcccgcccagattacgcaaccgtaactggcgagcgatagcctgcgtcgcttcaatattggtattgaaaatggtgtcgtccagattgcgatgaccgacaaacgctccggtattgatgtccacggtggtcatcgcttcggtctggtcgataatgagataaccaccggatttcagttctactttgcgttccagcgctcgctggatttcgttttcgacatcaaagagatcgaaaatcggctggcgtcctgtgtaatgctccagcttgcttgtcatctcgggaatgtactcgctggtgaactcaagtaacgcttcgtaagtcaggcgactgtcaacgcgaatgcggtccagttcggcatcggcgaaatcacgcagaacacgctgcgccagcgccagttcgccgtacagctgataacgggtctgcgggcgttttttacgctccataactttggtccagacgcgtttcagataagcggcatcggaggccagttcagcctcgccaaccccttccgctgcggtacggatgataaacccgccctgctcgtcgcaatactctgcgaccacttttttcaggcgttcacgttcactttcgctttcaatacgttgggaaaccccaacgtgagaagcccctggcataaacaccagatagcgagaagggagcgtgatatcggtggtcaggcgcgcacctttagtgccaagcggatctttcaccacctgcaccatcagatcttgcccctgacgaaccagttcgctgatgtcgcgcaccgtgaattgcttttgttcttcacccgccacacattcggtgtgcggcatgatgtcggatgcatgaagaaacgcggctttatccagcccaatatctacaaaagccgcctgcatacccggaagtacacgacttacacgacccttgtagatattgcctactattccgcgtcgcgcctcacgttcaatatgaatttcctgcagaataccgccatcaatatacgccactcgcgtttcgctaggcgttacgtttactaacaattcagccgtcatgtttatcccttttctcacgcagtgcgttaaaattacttaataattcatacgtttcaaccagcggtaagccgactacggcgtgatagctgccatttatcttcctgacaaaacagccacccagcccctgaataccgtatgcacctgctttatctaacggttcatcgctggcgacatagcccgcgatgtcttcgtctgttaacgttctgaaagtcacatcggtgaccaccaggcaatcgagaatgtgctggctgtcggccaacgccactgctgtcatcacctgatgggtctgaccgcttaatttgcgcaacatctgcgccgcatgctctgcgtcgcgcggtttctccagcacttctccgttcaggataacgatagtatccgcacccagcaccgggagatccttcgccgtttgcgcgacacctgcccgtgctttctcgcgcgccagacgcacaacatactgctgcgcgctctcctgcggctgacgctgctcctcaatgcccgtaacaatacgttcaaaggtcacgccaagttgcgcaagtaactcctgacgacgcggagaaccggaagctaaatacagagaagtcatagaaacctttattgcactgcaaactgctgacggactttgcgcatcagcaagaaaatccacggccagagcaccccattgactacactactccagaacacttccggtctgaaagagacgttaatcactaaaaactctgcccagaaaacaataatatccaccaccaggctaagcaacatgacgaccagcgcctgctgccataatgcgaggttgcggaaaagctggtatttcagcgccaccaggtaagcaatgatgctcatcgccaatacgcgtacgccaagcgtgctgccgctgatcagatccagtatggcacccatcacaaaacctgtgcccacatttacgcgatgaggcaaggccaggatccaatacaacaagatgagtaacacccagtttggccggaaaacaatcaggttatccggccagggcatgatttgcagcaacagcgcaatgaggaaagagagccagattacccagcgtccctggctacgatagctcgccactattgccctcccggcgcacgttattgccctcccggcgcacgcgcaggcggttgagcaccactttgcggcggcgtagccctttgtggagagcgattagcagcaggctgtgtcggcgcagcaggcgcagtagctgcatttcctgtcgccggttgctgcggagtcggctgagcgatccccgttgccggttcaggtaactttggccccatcgcgtctgggctaggcaatacctgcggcatcatctgcatcagacgttcattagcaacacgatgcacctcttccggcgtcatcgggttagcgccgttacgatctgccccccacagcagcagcagataacgcaaacgttgcagccctgcagtcggacgcgcctgaatcacagtataagcgcgctgggtatcgagttttacggaagagacaaccgcgaccggatagccttccgggaaacgaccgcccagaccggaagtcaccagcacatcaccaacacgaatatccgtattcgccggcagatgctcaagctgcaaatcatccgtacaaccgttaccggctgcaattacgcggatatcgttgcgcagcacctggattggcagcgcgtgggtcgcatcacaaatcagcagcacgcgactggtcagtttagcgacggccaccacctgaccaacaacacctttgtcgctgatgaccggctggccttcataaacgccattaacgctacctttatcgataacaacttgatcgctataaggatcgttaaccgtggagataacctgagtcaccattttctgctcatcctgacgcagcggggaacccagcagctcgcgcagacgcgcgttctcctgtttgtattgtccaagcatcagcagttcactgtttttcagcaacagttcctgacgtaacgcccggttttcaagttctaattggtcacggctggccagcgtctggcttacgccatccagcaattcacgaggagcattggaaacaaagtagaaaggactgacggcggtatccatataagtacggatttgactgaacgtccccaggcggctgtcggcaataataatgccgagcgccaccagcaccgccagaataaggcgaatctgtaggctcgggccacggctaaaaattggcttcataagttatgcgtattctcgtatcagaccaggcagggtaaacagacacttcccctgcctgcatccgattactcttcgctgaacaggtcgccgccgtgcatgtcgatcatttccagcgctttgccgccaccgcgcgccacacaggtcagcgggtcttcagcaacaacgactggaatgccggtttcttccattaacaaacggtcaaggttacgcagcagtgcgccaccaccggtgagcaccatgccgcgctcggagatgtcggaagccagttccggcgggcactgttccagtgcaaccattaccgcgctcacaataccggtcagcggttcctgcagtgcttcgaggatttcattggagttcagggtaaaaccgcgtggaacaccttctgccaggttacggccacgaacttcgatttcacggacttcatcgcccggataagcgctaccgatttcgtgcttgatacgttctgcggtggcttcaccgatcagagaaccgtaattacgacgcacatagttgatgatagcttcgtcgaaacggtcaccaccaatgcgcacagaagaggagtaaaccacaccgttcaaggagataacagcaacttcagtggtaccaccaccgatatcaaccaccatagaaccggtcgcttcagaaaccggcaggccagcaccaattgcggcagccatcggttcttcaatcaggaagacttcacgggcaccagcgccctgcgcggattcacgaattgcgcggcgttcaacctgggtcgcgccaaccggcacacaaaccagaacgcgcgggcttggacgcataaagctgttgctgtgcacttgtttgatgaagtgctggagcattttttcagtcacgaagaagtcggcgataacgccgtctttcattgggcgaatggcagcaatattgcccggcgtacggcccagcatctgcttcgcgtcatgacctactgcagctacgcttttcggactaccggcacgatcctgacgaatggccaccacggaaggctcattcaatacgatgccttgtccttttacataaatgagggtattcgcagtacccaggtcaatggacaagtcattggaaaacatgccacgaaattttttcaacatactaagggataatcctgaaagctggggcggaaaagaaaatccgcttactttaccaaccacacgcagcagcgacaaggcgcaaaaatcatctgctacggtgaaaattagtgcagttcgtttcctttgttacaaatctctgcctgagtccagaaaggcttaatgcatcagcagcattcctcgcctgtttgcaaccgcgtaaggtcattcatctgcatatgtgctgcaacaatctggcgagcagacaagcacactcccatgagacgcagcgcgcattattctacgtgaaaacggattaaacggcaggttaaacgctgtatctttgactatattttttcacgttagtatcaagtggctgactggacgcgaaaaaatccccttgcccgcctgtaacaccgcgctgaatcagggtctgccactcgcttcggctacgcacgccggtggcgtaaacctgggtgctggtcccggagcaggcttccaccaggctttgaaccagcagctggttctccgttcgcttctcaatgtttctgaccagccccggatggagcttgagtaactcaacattaagttctttgatccaactggtacttaccagcgtcaaaccagcctggttgacggctacccgtacccctaaagcattcactaaacgaataacaggttgtaaacgactgatatgttgacctacatcggcctctgcaagttcaataattatgcgttttcgttgacttttttcacattgcattaacgtatcgcgcagccaacgctgaaaacgcgggcgaatcaggctctcaacggtaacctgaatcgccagattttcctctggccagtaacgcaatagtggaataagacggctgatttgcagacggtcatactcttcgcttaagccaaactgcaagaccatcggcatatactccgcgctgctaacctcttcattaccatcgaagatgcggcacatgagttcgcgatgatgaacctgaccttcgcgagtaaccgccggtttttgataaaggcgcgggccgccgcgactgagcatttgctcgataagcgtacgccagcgaacattaccgcgtcctttttcaggcaagctgtcatcgtaaatagcccagctattgccgccctgcaatcccgcattacgcgtggcagactctgcatgttccattacctgctcggtatcctgaccactacgccaggcgcagataccaatgtggatcatatcgtcgcgatcgagcattttattgttcggcaaggtatcaacggctttgattaactgaccggcgatgctctctgcctcttttaacgtccggtgcggtaacagcgcagcaaaatcactgcggtggtaacgcgccagcagtgcgccagggtagcgcatcataaatgtgctcagcagattcgtcagagtgaagaactgttcttcaacctggctgtgcccccaggtatcgctcaacatattgaaatccggcagacgaatcatcatcacgatcccgtgggtacctactttctcctgatcttccagtaacgttgctaactgattatcgaaaaagagtcggttattgaggccggttttcacgtcctgggcggcataagagcggatcagcgtatcaagacggctgtgttgttcgcgtgcgttctgaatttcacgaagcagcgtatccagcgcactgctggttctgggcggccattcatagatggttcccaacacattagagccacgctcaccgtttaagatacgagtagcccgggtttccagcaattcttgcccggcaagttgccgttgtaaccagcgtaccgccaggaagagcataacaatgataaagccaatcgcccccgtgagcggcgcggtggtcatcaagctatggaaatagttgcccatcggatcctgataaaccagacgcaagctcatccccggatgctttatcaacggaacgctcagttcgcgaaacagatcgctggagccaactggacgataactaccatttctggccagggtataaacctgtttatcaccatggagcaggtctacacgaacgatatctgcgctcatcattaattcggtaatttgtggccttaatacgctgaagtcattgctcacaaggtgggtatcaatcgccgtcgccaccgcctgaacgcgatgactaaacttatactgaatggcgttgtagaaacttaggctacagcccagcaaagtcacaaaaattgttaacccggtgagcagcgtaacaaaggcgctaaatttcgtcgttaatctcatccttgtgttaactccgatagtgaggaagcgggcatactagcaaatcagatttatctcgcaatttattgcgcttcatcggctttgcttttccattagcgagtatagtcttcagaaattattttccaatccatcatgcacatgaggaccacttatgcaggcgttacttttagaacagcaggacggcaaaactctcgcaagtgtacagactctggacgaaagtcgcctgccggagggcgatgtcacggtcgatgttcactggagcagcctgaactataaagatgcgctggcgattaccggtaagggaaaaatcatccgtaattttccgatgattcctgggatcgattttgccggaactgtacgcaccagcgaagatccgcgttttcatgccggtcaggaggtgttactcactggctggggcgttggtgaaaaccactggggtgggctggcggagcaggcgcgagtgaaaggtgactggctggttgccatgccgcaagggctggacgcgcgtaaagcaatgattatcggtactgccggttttaccgccatgctgtgtgtgatggcgctggaagatgccggtgttcgcccgcaggacggggagattgtcgtgacgggtgccagtggtggcgtcggcagtaccgccgtggcgctgctgcataagttgggttatcaggtcgttgccgtttccggtcgcgaaagtacccatgaatatctgaaaagtttaggtgctagccgtgttctccctcgtgatgagtttgccgaatcccgtcctctggaaaaacaagtctgggctggggcaattgacaccgttggcgacaaagtgctggcaaaagtgctggcgcaaatgaattacggcggctgcgtggcggcctgtggtctggcgggtggttttactctgccaaccacggtcatgccatttattctgcgtaatgtccgtttgcaaggggtggatagtgtaatgacgccaccagaacgccgcgcacaagcctggcagcgactggtcgccgatttaccggaaagtttctatacccaggcggcaaaagagatatctctgagtgaggcaccgaactttgccgaggccatcattaataaccagatccagggtcgcacgctggtgaaggttaactaaccatttagcagggaataataagagagggaactcattttgaaatcattattcaatcggttaacgggaaaagcggttagccggacagctttcgtcgaacaccttggtcaggaagttatacaacatcatccaaactggaaagtcatgatttcgactgaccacaaattgatgcgcattgatactccactaaacagctattattgatacgcctccgtcgcctgttaggtttatgttgctttgcctgggcgacgctacgcttagccccttacttatttctggtaccatggggtgaataatctgattttgtttgactacaaattaatcactcgaacctatttaatgctgagcattgtcaatcggttaattttgcgtgctttagcattcacatctatccagacgatgcagtgaaaattgggtaatccccagcaaccgctgcgtaatgtcgtctatcttgtcgcgatcctggcatccctacattatttgtggtctgtgaagattatctcattgcagcccctcatcttcgcagggctggcttttcagcttttcaccttacgttataagaagttccgtcgatgatggcgctaatttcgtgaattgtgcggcttgttgcaaattacacggtgttgaaggttatttacatgttagctgttgattatcttccctgataagaccagtatttagctgccaattgctacgaaatcgttataatgtgcgacctcgtcctccctgacgcagtttttgcgctgcggaaaaggtgacattggcgcaacgaaggtatattttgttttttgccggaggatagcagcagatcgctgcacaatgtccgtcaagtctaacattgacactctggggcaaaatagaccggcgtcccggcctgctggaatttatcgctatgcatacagctgtcggggcatacgctttacagacggcggtgaaacgcctgtcacaatcacactaaacaaagagtacggaacccactcatggatattcgtaagattaaaaaactgatcgagctggttgaagaaagtggcatctccgaactggaaatttctgaaggcgaagagagtgtacgcattagccgtgcagctcctgccgcaagtttccctgtgatgcaacaagcttacgctgcaccaatgatgcagcagccagctcaatctaacgcagccgctccggcgaccgttccttccatggaagcgccagcagcagcggaaatcagtggtcacatcgtacgttccccgatggttggtactttctaccgcaccccaagcccggacgcaaaagcgttcatcgaagtgggtcagaaagtcaacgtgggcgataccctgtgcatcgttgaagccatgaaaatgatgaaccagatcgaagcggacaaatccggtaccgtgaaagcaattctggtcgaaagtggacaaccggtagaatttgacgagccgctggtcgtcatcgagtaacgaggcgaacatgctggataaaattgttattgccaaccgcggcgagattgcattgcgtattcttcgtgcctgtaaagaactgggcatcaagactgtcgctgtgcactccagcgcggatcgcgatctaaaacacgtattactggcagatgaaacggtctgtattggccctgctccgagtgtaaaaagttatctgaacatcccggcaatcatcagcgccgctgaaatcaccggcgcagtagcaatccatccgggttacggcttcctctccgagaacgccaactttgccgagcaggttgaacgctccggctttatcttcattggcccgaaagcagaaaccattcgcctgatgggcgacaaagtatccgcaatcgcggcgatgaaaaaagcgggcgtcccttgcgtaccgggttctgacggcccgctgggcgacgatatggataaaaaccgtgccattgctaaacgcattggttatccggtgattatcaaagcctccggcggcggcggcggtcgcggtatgcgcgtagtgcgcggcgacgctgaactggcacaatccatctccatgacccgtgcggaagcgaaagctgctttcagcaacgatatggtttacatggagaaatacctggaaaatcctcgccacgtcgagattcaggtactggctgacggtcagggcaacgctatctatctggcggaacgtgactgctccatgcaacgccgccaccagaaagtggtcgaagaagcgccagcaccgggcattaccccggaactgcgtcgctacatcggcgaacgttgcgctaaagcgtgtgttgatatcggctatcgcggtgcaggtactttcgagttcctgttcgaaaacggcgagttctatttcatcgaaatgaacacccgtattcaggtagaacacccggttacagaaatgatcaccggcgttgacctgatcaaagaacagctgcgtatcgctgccggtcaaccgctgagcatcaagcaagaagaagttcacgttcgcggccatgcggtggaatgtcgtatcaacgccgaagatccgaacaccttcctgccaagtccgggcaaaatcacccgtttccacgcacctggcggttttggcgtacgttgggagtctcatatctacgcgggctacaccgtaccgccgtactatgacagtatgatcggtaagctgatttgctacggtgaaaaccgtgacgtggcgattgcccgcatgaagaatgcgctgcaggagctgatcatcgacggtatcaaaaccaacgttgatctgcagatccgcatcatgaatgacgagaacttccagcatggtggcactaacatccactatctggagaaaaaactcggtcttcaggaaaaataagactgctaaagcgtcaaaaggccggattttccggccttttttattactggggatcgacaacccccataaggtacaatccccgctttcttcacccatcagggacaaaaaatggacactcgttttgttcaggcccataaagaggcgcgctgggcgctggggctgacccttttgtatctggcagtttggttagtagccgcttacttatctggcgttgcccccggttttaccggctttccgcgctggtttgagatggcctgcatcctgacgccgctgctgtttattggactgtgctgggcgatggtgaaatttatctatcgcgatatcccactggaggatgacgatgcagcttgaagtaattctaccgctggtcgcctatctggtggtggtgttcggtatcagcgtttatgcgatgcgtaaacggagcaccggcaccttccttaatgagtatttcctcggcagccgctctatgggcggtattgtgctggcgatgacgctcaccgcgacctatatcagtgccagtagctttatcggcgggccaggagctgcttataaatacgggctgggctgggtattgctggcgatgattcagcttcctgcagtctggcttagtctcggtattctcggcaagaagtttgcgattcttgcgcgccgctacaatgcagtgacgctgaacgatatgctgtttgcccgctaccagagtcgtcttctggtgtggctggcgagtttgagtttgctggttgcgttcgttggtgcgatgaccgtgcagtttatcggcggtgcgcgcctgctggaaaccgcggcgggtattccttatgaaaccgggctgctgatttttggtatcagcattgcgttatataccgcctttggtggctttcgcgccagcgtgctgaacgacaccatgcaagggcttgtgatgctgattggcaccgttgtgctgcttattggcgtagtacatgccgctggcggcttaagtaacgcagtacagaccttgcaaaccatcgatccgcaactggttacgccacaaggcgctgacgatattctgagccctgcctttatgacgagcttctgggtactggtgtgttttggcgtgattggcctgccgcatactgcggtgcgctgtatctcttataaagacagcaaagccgtacatcgggggatcatcatcggtacgattgtggtcgcaattctgatgttcggtatgcacctggccggagcgttaggtcgggcggtgatccccgatctcaccgtaccggacctggtgatcccaacgttaatggtaaaagtgctgccaccgtttgctgccgggatcttcctggctgcaccgatggctgcgatcatgagcacaattaacgcccaactgctgcaaagttccgctacgatcattaaagatctctatctgaatatccgtccggatcaaatgcaaaacgagacgcgtctgaagcggatgagcgcggtaattacgttagttctcggcgcgttgctgctgcttgccgcctggaagccgccagaaatgatcatctggctgaatttgttggccttcggtgggctggaagccgttttcctgtggccgctggtgctgggtctttactgggaacgcgccaacgccaaaggcgcgctaagtgcgatgatcgttggcggcgtgctgtatgccgtactcgcgacgctgaatattcagtacctgggcttccaccctatcgtgcccagcttactactaagtttgctggctttcctggtcggaaaccgtttcggtacatccgtcccgcaagctaccgttttgactactgataaataaagagttttgccatgccttggatccaactgaaactgaacaccaccggcgcgaacgcggaagatcttagcgatgcgctgatggaagcgggtgccgtttctatcacttttcaggatacccacgatacgccagtatttgaaccgctgccgggcgaaacgcgcctgtggggcgacaccgatgtgattggtctgttcgacgctgaaaccgatatgaacgacgtggtggcgattctggaaaaccatccgctgctcggcgcaggcttcgcgcataaaatcgaacaactagaagataaagactgggagcgcgaatggatggataatttccacccgatgcgctttggtgaacgactgtggatctgccctagctggcgtgatgtgccggacgaaaacgccgtcaacgtgatgttagatccagggctggcgtttggtacgggtacccatccaaccacctctctgtgcctgcaatggctcgacagcctcgatttaaccggtaaaacagtcatcgactttggctgtggttccggcattctggcgatcgcggcgctgaaactgggtgcagcaaaagccattggtattgatatcgatccgcaggcgattcaggccagccgcgataacgccgaacgtaatggcgtttctgaccgtctggaactctacttaccgaaagatcagccagaagaaatgaaagccgacgtggtggtcgctaacatccttgcaggcccattacgtgaactggcaccgttaatcagcgtcctgccggttagtggcggtttgctgggcctttccggtattctggcaagccaggcagagagcgtttgtgaagcttatgccgatagcttcgcactggacccggtcgtggaaaaagaagagtggtgccgtattaccggtcgtaagaattaaccttcgcatcgccgtagggtgacgcggggcgaagtgcgagcaagctcacaaaaggcacgtaaatttgccgattatttacgcaaatttgcgtgccaaaattttcattcataaagaaaaattgagaacttactcaaatttctttgagtgtaaattttagtcactattttctaatatgatgatttttatgagtaattatcgcaccacgctcattttaaatgcaattctttgatccatctcagaggattggtcaaagtttggcctttcatctcgtgcaaaaaatgcgtaatatacgccgccttgcagtcacagtatggtcatttcttaactcatgcgcatcggacaatatcagctcagaaatcgcctgatcgcagcgcccatggctggcattacagacagaccttttcggacgttgtgctacgagatgggagccggattgacagtatccgagatgatgtcttctaacccacaggtttgggaaagcgacaaatctcgtttacggatggtgcacattgatgaacccggtattcgcaccgtgcaaattgctggtagcgatccgaaagaaatggcagatgcagcacgtattaacgtggaaagcggtgcccagattattgatatcaatatgggttgcccggctaaaaaagtgaatcgcaagctcgcaggtagtgccctcttgcagtacccggatgtcgttaaaagcatccttaccgaggtcgtcaatgcagtggacgttcctgttaccctgaagattcgcaccggctgggcaccggaacaccgtaactgcgaagagattgcccaactggctgaagactgtggcattcaggctctgaccattcatggccgtacacgcgcctgtttgttcaatggagaagctgagtacgacagtattcgggcagttaagcagaaagtttccattccggttatcgcgaatggcgacattactgacccgcttaaagccagagctgtgctcgactatacaggggcggatgccctgatgataggccgcgcagctcagggaagaccctggatctttcgggaaatccagcattatctggacactggggagttgctgcccccgctgcctttggcagaggttaagcgcttgctttgcgcgcacgttcgggaactgcatgacttttatggtccggcaaaagggtaccgaattgcacgtaaacacgtttcctggtatctccaggaacacgctccaaatgaccagtttcggcgcacattcaacgccattgaggatgccagcgaacagctggaggcgttggaggcatacttcgaaaattttgcgtaaacagaaataaagagctgacagaactatgttcgaacaacgcgtaaattctgacgtactgaccgtttctaccgttaactctcaggatcaggtaacccaaaaacccctgcgtgacagcgttaaacaggcactgaagaactattttgctcaactgaatggtcaggatgtgaatgacctctatgagctggtactggctgaagtagaacagcccctgttggacatggtgatgcaatacacccgtggtaaccagacccgtgctgcgctgatgatgggcatcaaccgtggtacgctgcgtaaaaaattgaaaaaatacggcatgaactaattcaggttagctaaatgcttgattaaaaaggcgctactcggcatggggaagcgccttttttataggtgtcacaaagggagtgaccatgagaacaggatgtgaaccgacccggtttggtaatgaagctaagaccattattcacggtgatgcgcttgccgaacttaaaaagatccccgccgaaagtgtcgatctgatctttgccgacccaccatataacatcggtaaaaattttgatggtctgatcgaagcctggaaagaagatctgtttatcgactggctgtttgaagtgattgcagagtgccaccgcgttctgaaaaagcagggcagcatgtacatcatgaacagtacggaaaacatgccctttatcgatctccagtgccgcaagctttttaccatcaaaagtcgcatcgtctggagttatgacagttctggagtgcaggcgaaaaaacactacggctccatgtacgaacccatcctgatgatggtgaaagacgcaaagaactacacattcaacggtgatgctattctggtagaagccaaaaccggaagccagcgcgcgttgatcgattatcgcaaaaatcctccacagccttacaatcatcaaaaagtaccgggtaacgtttgggattttccgcgcgtgcgttatttgatggatgaatatgaaaaccacccgacgcaaaaaccggaagccttactgaaacgcattattctcgcctcttccaacccaggcgatatcgttctcgacccgtttgctggtagctttactaccggtgccgtagccatcgccagcggacgaaaattcattggtattgagatcaacagcgagtacatcaaaatggggcttcgacggctggatgtcgcgagccattactctgcggaagaactggcgaaagtgaaaaaaagaaagaccggcaacctgagtaaacgaagccggttaagcgaagttgaccccgatctcattacaaagtaaaggatgtgtaagcctggttttcagattattcatttcgtgtatatttcctgccagacttggttaaacatgcacaggctcaggtaatgattcgcaagtattggtggctcgtcgttttcgctgtcttcgtttttctgtttgatactttactgatgcagtggattgaactgctggcaacagaaacagacaaatgccgcaatatgaacagtgttaatccactaaaactggttaactgtgacgaactgaattttcaggacagaatgtgaatttacatgacacttaattcattcgtttgatgaattaatttcgttatgttttcatctggcatgaacattcttaatacgttatcgaccagagcgggggcttgtttataaagatcataacccgccatattcattaaccagttttgaacaattccgctgaaggcaccatcaataataatcatcacaacatctaaatcgaggttatttgctacacaaccttgttgctgacacgcctgcaatacttcgcggagagtctgcggattaaagcccatcttttcgcgtatcactccctcggccagcatctcatcattaaattcacatttgtgatataagattttcagcaacgcctgctggcggggaattttggcaatatattgcaagccgacaatcaatttttcacgcaattgttgaaacgggtcatgctctaatccagccgtcaagtgttcctggattaactcccgcaaactaggctgttgcaaccacatctcattaaacagttgagtcttgttttcgaagtgccagtagatagcgccacgcgtaacgttagcggcgtcggcaatgtcgttgagcgtcgtcttgcttacgccatgctgcgcaaactgggcgatggcagtttcaatcagttcttgccgggtcttcagagcttcggctttggttctttttgccatgattaattattcaggaaataaatatattcgacacagagtgagaaaatagcgaaggttaatctatcacctaatgtgtatttatacgagaggctaatattgagttgctataaatcgttaaataaataatatatattatttacctaagatacattcactacatcaatatatatttcaatttacgaggttttaattctgcctctttcaacccgcgtcaaaataaaacagtagaatattaatctttttttgtgtttatgtgccttgagatgcctgtattcataactattccttacatcgacgaatgataatttgtaggatagcgaactgtatttttctttctgcgagttaacgcgttgcctttttgggtaaataacgcgcttttggttttttgaggaatagtaatgacgaaacatgccaggtttttcctcctgccctcctttattctgatctccgcggctttaatcgccggttgtaacgataagggagaagagaaagctcacgtcggtgaaccgcaggttaccgttcatattgtaaaaacggccccgttagaagttaagactgaattaccaggccgcaccaatgcttatcgtatagccgaagttcgcccacaggttagcgggatcgtactgaatcgcaatttcactgaaggcagcgatgtgcaagcaggccagtccctgtaccagatcgatcccgcgacctatcaggcaaattatgacagcgcgaaaggcgaactggcgaaaagtgaagccgccgccgccatcgcgcatttgacggtaaaacgttacgttccgctcgtgggtacgaaatacatcagccagcaggagtacgaccaggccattgctgatgctcgtcaggccgatgccgccgtgattgccgcaaaagccacagtcgaaagcgctcgcatcaatcttgcttataccaaagtcactgcgccaattagcggacgtatcggcaaaagcactgtgaccgaaggcgctcttgtcactaatgggcaaacgactgaactggcgactgtccagcagctcgatcctatctacgttgatgtgacccaatccagcaacgattttatgaggctgaagcaatccgtagagcaaggaaatttgcataaggaaaacgccaccagcaacgtagagttggtcatggaaaacggtcaaacctatcccctgaaaggtacgctgcaattctccgatgtgaccgttgatgaaagcaccggctccataaccctacgtgctgtcttccctaacccgcaacatacgcttttgccgggtatgtttgtgcgtgcacggattgatgaaggcgtccaacctgacgccattcttatcccgcaacaaggcgttagccgcacaccgcgtggtgatgcaaccgtgctgattgttaacgataaaagtcaggttgaagcgcgccctgtcgttgccagtcaggcgattggcgataaatggttgattagtgaaggactgaaatctggcgatcaagtcattgtcagcggcctgcaaaaagcgcgtccgggagagcaggttaaagccactaccgatacccccgcagatactgcaagcaagtaaggtaatctgacatggcaaacttttttattcgacgaccgatatttgcatgggtgctggccattattctgatgatggcgggcgcactggcgatcctacaattgcccgtcgctcagtatccaacaattgcaccgcctgcggtttctgttagtgcaaactatccgggcgctgatgcgcagaccgtgcaggatacggtgacgcaggttatcgaacagaatatgaacggtatcgataacctgatgtatatgtcctccaccagcgattccgccggtagcgtgacaattacccttaccttccagtccgggaccgatcctgatatcgcgcaagtgcaggtgcagaacaaactccagctcgccacgccgttgctgccgcaggaggttcagcagcaggggatcagtgttgaaaagtccagtagcagctatttgatggtggcgggctttgtctctgataacccaggcaccacacaggacgatatcagcgactatgtggcctctaacgttaaagatacgcttagccgtctgaatggcgtcggtgacgtacagcttttcggcgcacagtatgcgatgcgtatctggctggatgccgatctgctaaacaaatataaactgacaccggttgatgtgattaaccagttgaaggtacagaacgatcagatcgctgccggacagttgggcggaacgccagcgttaccagggcaacaattgaacgccagcattattgctcagacgcggtttaaaaatccggaagaattcggcaaagtgaccctgcgcgtaaacagtgacggcagcgtggtacgcctgaaagatgtcgcacgggttgaacttggcggtgaaaactataacgttatcgctcgtatcaacggaaaaccggcggcgggcctggggattaagctggcaaccggcgcgaatgctctcgataccgcgaaagccattaaggcaaaactggcggaattacagccattcttcccgcagggaatgaaggttctctacccttatgacaccacgccattcgtccagctttctattcacgaagtggtaaaaacgctgttcgaagccattatgctggtgttcctggtgatgtatctgttcttgcagaatatgcgagcaacgctgatccccgccattgcggtacccgtggtgttgttagggacgtttgccatcctcgccgcttttggttactccatcaacacactaacgatgttcgggatggtgcttgccatcgggctgctcgtcgatgatgcgatagtggtggtggagaacgtcgagcgcgtgatgatggaggataagctcccgccaaaagaagcgacggaaaaaagcatgagccaaattcagggcgcactggtgggtatcgcgatggtgctgagtgcggtatttattccgatggcattcttcggcggttctactggggcaatttatcgccagttctctatcaccatcgttagcgcaatggcgctttctgttctggtggcattgattcttacccctgcgttatgtgcaacgctgcttaaacccgtctctgctgagcatcacgaaaataagggcggtttcttcggttggtttaataccaccttcgatcatagcgttaaccactacaccaacagcgtcggcaaaatcctcggatccacaggacgatatttactgatctatgcgctgattgttgcaggaatggtggtgttgtttttacgtcttccgtcttccttcttacctgaagaggatcagggtgtctttctgaccatgattcagttacccgctggcgcgacgcaagagcggacgcaaaaagtgttggatcaagttacggattactatctgaagaacgagaaagcgaacgttgaaagtgtctttacggttaacggctttagcttcagcggccaggcacaaaacgccggtatggccttcgtcagtctgaaaccgtgggaagagcgtaatggtgacgaaaacagtgcggaagcggtaatccatcgtgccaaaatggaattgggcaagatccgcgacggttttgtcattccattcaatatgccagccattgttgaactgggcacggcaacgggtttcgactttgagttaattgatcaggctgggctgggtcacgatgccctaacccaggcccgtaaccagttgcttggtatggcggcgcaacatcctgccagcttagtcagcgtgcgccctaatggcctggaagacaccgcgcagtttaaactggaagttgaccaggaaaaggcgcaggcattaggtgttagtctttctgacatcaatcagaccattagtacggcgctgggtgggacttacgttaacgacttcatcgaccgtggccgcgtgaaaaagttgtatgttcaggcggatgccaaattccgtatgctgccagaagatgtcgataaactttatgtccgcagcgccaacggcgaaatggtgccattcagcgcctttaccactagtcattgggtgtatggctctccgcgactggaacgctacaacggtctgccgagtatggagattcagggggaagccgcgccaggaaccagttccggcgatgccatggcgttgatggaaaaccttgcgagtaaattacctgcgggcattggttatgactggacgggtatgagctatcaggaacgcttaagcggaaaccaggctcccgctctggtagcaatttcctttgtggttgttttcctgtgccttgctgcactctatgaaagctggagtattcctgtcagcgttatgttggtagtgccgttagggattgtcggcgtgctgctggcggcgacactctttaatcaaaaaaatgacgtctactttatggtgggcttgctaacgacaattggcttgagcgccaaaaacgctattttgatcgttgagttcgctaaagatctcatggagaaagagggtaaaggtgttgttgaagcgacactgatggcagtacgtatgcgtctgcgtcctatcctgatgacctctctcgcctttattctcggcgtattaccgctagctatcagtaacggtgccggcagtggcgcgcagaacgctgtgggtatcggggtaatgggaggaatggtctctgcaacgttgctggcaatcttcttcgtaccggtgttctttgtggtgatccgccgttgctttaaaggataaatcagaaacataaaggcgctttcgggtgcctttattatttccagtgaaacccataaaaattaataagatattcttctgctcactctttaaaagctttctatagttcccgctcccttcactatttttacaattcacataatttgtcattattcattccgcaagatttataacctccggtgataaaatggcattcagctcgttaataagagagttaacttattaagcgttagcgtttattactgaggtaacaccatgaaaagattaattcctgtggcattgctcaccgcattgctggcgggctgtgctcacgatagcccctgcgttccggtttatgacgatcagggtcgtctggttcacaccaatacctgtatgaaaggcacgactcaggataactgggaaacggctggggctattgccggcggggcagctgctgttgctggcctgacgatggggatcatcgctctaagcaaataactgaacagggcgcggagttccgcgctctttttaacgatacagtatctctccataagataaaatattgctatattctgctgggtaattccctgctgatttagcatgttacatcgcgttatttcgctgctttcgaaataacgcatcaatttaattttcacacttcccaccagaaatatactcacgctaacaatcattattctgcttagtaaaacacgcgtaaatattttgcgccaaaatgtggcgcatgtttcattttcgcaccattgcggggcgctgtttttattatttcctgtctacactcagcttattgcgacgcgaaatcgtgcgcaaaagctggcactacttttgcttataagaggatggccacagacaggtaaaagacgtttcccaaacgtcctataacgataattttcgcctcacaggaagcattatgaaaaagatgatgatagccacactggctgccgccagcgtgctgcttgccgttgcaaatcaggcgctgctggcgcgacgcttgatgccgttcagaaaaaaggttttgtgcaatgcgggatcagtgatggattacctgggttctcttatgccgatgctgacggtaagtttagtggtattgatgttgatatttgtcgtggtgttgccgctgctgtatttggtgacgacacgaaagtgaaatataccccgctcactgcaaaagaacgcttcaccgctttacagagtggggaggtggatttgctctcccgtaatacgacctggactagttctcgcgatgccgggatgggaatggcatttaccggcgtcacttattacgacggcattggcttcctgacgcacgataaagcggggctaaaaagcgcgaaagaactggatggcgctaccgtctgtattcaggcgggtactgataccgaactcaacgtcgccgactacttcaaggcaaacaatatgaagtacacaccggtgactttcgatcgctctgacgaaagtgcgaaggcactggaatctggtcgctgcgatacgctggccagcgatcaaagtcaactgtatgccctgcgcatcaaattaagcaacccagctgaatggattgtcttaccggaagttatcagtaaagaaccgcttggtccggtagttcgtcgtggcgatgatgaatggttcagcattgtacgctggacgcttttcgccatgctgaatgctgaagagatgggcatcaattcccagaacgtcgatgaaaaagcggctaatccagcaacgcctgatatggcacatctgctgggtaaagaaggcgattacggcaaggatctgaagctggataataaatgggcctataacatcatcaaacaggtgggtaactacagcgaaatttttgagcgtaacgtaggtagtgaaagcccgctgaaaattaaacgtgggcaaaataatctctggaataacggcggtattcagtacgcaccgcccgtgcgttaagtcggtgtgaggtaacgagcgtcgctacggcggcgctctcttcagcgttatgctttccgaggtttctatgtctcatcgccgcagtaccgttaaaggcagtctctcttttgccaaccctacggttcgcgcctggttattccagatccttgccgttgttgctgttgtcggcattgttggttggttatttcacaacactgtaacgaatctcaataatcgtggcattactagtggttttgcctttctggatcgcggcgctggcttcggtattgtccagcatttgatcgattaccagcagggcgacacctacggacgcgtttttattgtcggcttactcaatacgctactggtttctgcattgtgtattgtgttcgcttctgttttgggcttctttatcggtctggcgagacttagcgataactggctgctacgaaagctttccacaatttatattgagatcttccgtaatattcccccgctgctgcaaatcttcttctggtactttgccgtgttgcgcaatttgcccggaccacgccaggctgtgagcgcgtttgatctggcctttttgagcaatcgtgggctttatattccgagtccgcagctgggagacggatttattgcgtttatcctggctgttgttatggctatagtcctttctgttgggctattccgctttaataaaacataccagataaagaccggacaactgcgccgcacctggccgatcgccgcagtgttgatcattggtttgcctttactggcgcaatggctttttggcgcagcactacactgggatgtcccagccctacgaggctttaacttccgcggcgggatggttttaattcctgaactggcagccttaacgctggcacttagcgtttatacatctgcatttatcgccgagattatccgcgctgggatccaggcagtgccttatggtcaacatgaagcggctcggagtctgggattacccaacccggttacgctacgccaggtcattattccccaggcattgcgggtgattattccaccgttaaccagccagtatctcaacatcgtcaaaaactcctctcttgccgccgctattggctatcccgatatggttagcctgtttgccggcaccgtgctgaatcagacggggcaagccatcgagacgatagccatgaccatgagcgtctatctgattatcagcctgactatcagcctgctgatgaatatctataaccgccgcatcgcgatcgttgaacgctaaggagtcatgatgacaaaagtattgctgtctcatcccccgcgcccggcgagccataacagtagccgcgcgatggtgtgggtgcgaaaaaatctgttctccagctggagcaatagcctgctgactattggctgcatatggttgatgtgggaactgatcccaccgttgctgaactgggcatttttgcaggctaactgggttggcagtacgcgtgccgactgcacaaaagccggtgcctgttgggtcttcatccacgaacgatttggtcagtttatgtatgggctttacccacacgaccaacgctggcgaattaacctcgcattactgattgggcttgtgagcatcgcaccaatgttctggaaaatactcccgcatcgcggtcgctatattgcggcctgggcggtgatttacccactgattgtctggtggctgatgtatggcggtttttttgctcttgagcgggttgaaacccggcaatggggcgggctgacgctaactttaattattgcaagtgttgggattgcgggggcgctaccgtgggggatcttactggcgttaggtcgccgctcccatatgccgattgtgcgtatcttaagcgtcatttttatcgaattctggcgcggcgtgccgctgattaccgttctgtttatgtctagcgtcatgctgccgttgtttatggcagaaggcaccagtatcgacaaattgatccgcgcgctggttggcgtgatcctgtttcagagtgcatatgttgcggaagtcgtgcgaggtggattacaggcgctgcctaaagggcaatatgaagcggcagagagcctggcgttgggttactggaaaactcaggggctggttattctgccacaggcgttgaagctggtaattcctgggctggtaaataccatcatcgcactcttcaaagataccagcctggtgatcattatcgggttgttcgatcttttcagtagcgttcagcaggcaaccgttgatcccgcctggttgggtatgagcacggaagggtatgttttcgccgcgctgatctactggatcttctgtttcagcatgagccgctatagccagtatctggaaaaacgttttaacaccgggcgtacaccgcattgaggacactatgagccaaattttactgcaacctgctaacgcgatgattacgctggaaaacgtcaataaatggtatggacaattccatgttttgaaaaatataaatttaaccgtgcaaccgggagaacggatcgttctgtgtggccctagtggttccggtaaaagcacaaccattcgttgtattaatcatctggaagaacatcaacagggacggatcgtggtagatggcatcgaacttaatgaagatatccgcaatattgagcgcgtcaggcaggaagtgggaatggtctttcagcatttcaatctcttccctcatctgaccgttttacagaactgtaccctggcaccgatttgggtacgcaagatgcctaagaaagaggctgaagatctggcggtgcattacctagagcgggtgagaattgccgaacatgcgcataagtttcccggacagattagtggtggtcagcagcaacgcgttgccattgcgcgtagcctgtgtatgaagccgaaaattatgttgtttgatgagccaacgagcgcgctcgatcctgagatggtgaaagaggtgctggatacgatgattgggctggcgcagagcggtatgacaatgttgtgtgtaacacatgagatggggtttgcacgaaccgtcgctgaccgggtaatttttatggatcgtggggaaatagtggagcaagctgcacctgatgaattttttgcgcatcctaaaagtgagcgtacgagggcatttttaagccaggtaatccattaattgaatgttagttcgaaaagcaaaaaggccatcctttcggatggcctttcgcttgatttgatgtctggcagtttatggcgggcgtcctgcccgccaccctccgggccgttgcttcgcaacgttcaaatccgctcccggcggatttgtcctactcgggagagtgttcaccgacaaacaacagataaaacaaaaggcccagtcttccgactgagccttttgttttatttgatgtctggcagttccctactctcgcatggggagaccccacactaccatcggcgctacggcgtttcacttctgagttcggcatggggtcaggtgggaccaccgcgctactgccgccagacaaattcttttctaatctgccgaactttaacctaaaaagtggtgctgatacccagagtcgaactggggacctcacccttaccaagggtgcgctctaccaactgagccatatcagcacgctaaatttgatgcctggcagttccctactctcgcatggggagaccccacactaccatcggcgctacggcgtttcacttctgagttcggcatggggtcaggtgggaccaccgcgctacggccgccaggcaaattctgttttatcagaccgcttctgcgttctgatttaatctgtatcaggctgaaaatcttctctcatccgccaaaacagcttcggcgttgtaaggttaagcctcacggttcattagtaccggttagctcaacgcatcgctgcgcttacacacccggcctatcaacgtcgtcgtcttcaacgttccttcaggacccttaaagggtcagggagaactcatctcggggcaagtttcgtgcttagatgctttcagcacttatctcttccgcatttagctaccgggcagtgccattggcatgacaacccgaacaccagtgatgcgtccactccggtcctctcgtactaggagcagcccccctcagttctccagcgcccacggcagatagggaccgaactgtctcacgacgttctaaacccagctcgcgtaccactttaaatggcgaacagccatacccttgggacctacttcagccccaggatgtgatgagccgacatcgaggtgccaaacaccgccgtcgatatgaactcttgggcggtatcagcctgttatccccggagtaccttttatccgttgagcgatggcccttccattcagaaccaccggatcactatgacctgctttcgcacctgctcgcgccgtcacgctcgcagtcaagctggcttatgccattgcactaacctcctgatgtccgaccaggattagccaaccttcgtgctcctccgttactctttaggaggagaccgccccagtcaaactacccaccagacactgtccgcaacccggattacgggtcaacgttagaacatcaaacattaaagggtggtatttcaaggtcggctccatgcagactggcgtccacacttcaaagcctcccacctatcctacacatcaaggctcaatgttcagtgtcaagctatagtaaaggttcacggggtctttccgtcttgccgcgggtacactgcatcttcacagcgagttcaatttcactgagtctcgggtggagacagcctggccatcattacgccattcgtgcaggtcggaacttacccgacaaggaatttcgctaccttaggaccgttatagttacggccgccgtttaccggggcttcgatcaagagcttcgcttgcgctaaccccatcaattaaccttccggcaccgggcaggcgtcacaccgtatacgtccactttcgtgtttgcacagtgctgtgtttttaataaacagttgcagccagctggtatcttcgactgatttcagctccacgagcaagtcgcttcacctacatatcagcgtgccttctcccgaagttacggcaccattttgcctagttccttcacccgagttctctcaagcgccttggtattctctacctgaccacctgtgtcggtttggggtacgatttgatgttacctgatgcttagaggcttttcctggaagcagggcatttgttgcttcagcaccgtagtgcctcgtcatcacgcctcagccttgattttccggatttgcctggaaaaccagcctacacgcttaaaccgggacaaccgtcgcccggccaacatagccttctccgtccccccttcgcagtaacaccaagtacaggaatattaacctgtttcccatcgactacgcctttcggcctcgccttaggggtcgactcaccctgccccgattaacgttggacaggaacccttggtcttccggcgagcgggcttttcacccgctttatcgttacttatgtcagcattcgcacttctgatacctccagcatgcctcacagcacaccttcgcaggcttacagaacgctcccctacccaacaacgcataagcgtcgctgccgcagcttcggtgcatggtttagccccgttacatcttccgcgcaggccgactcgaccagtgagctattacgctttctttaaatgatggctgcttctaagccaacatcctggctgtctgggccttcccacatcgtttcccacttaaccatgactttgggaccttagctggcggtctgggttgtttccctcttcacgacggacgttagcacccgccgtgtgtctcccgtgataacattctccggtattcgcagtttgcatcgggttggtaagtcgggatgacccccttgccgaaacagtgctctacccccggagatgaattcacgaggcgctacctaaatagctttcggggagaaccagctatctcccggtttgattggcctttcacccccagccacaagtcatccgctaatttttcaacattagtcggttcggtcctccagttagtgttacccaaccttcaacctgcccatggctagatcaccgggtttcgggtctataccctgcaacttaacgcccagttaagactcggtttcccttcggctcccctattcggttaaccttgctacagaatataagtcgctgacccattatacaaaaggtacgcagtcacacgcctaagcgtgctcccactgcttgtacgtacacggtttcaggttctttttcactcccctcgccggggttcttttcgcctttccctcacggtactggttcactatcggtcagtcaggagtatttagccttggaggatggtccccccatattcagacaggataccacgtgtcccgccctactcatcgagctcacagcatgtgcatttttgtgtacggggctgtcaccctgtatcgcgcgcctttccagacgcttccactaacacacacactgattcaggctctgggctgctccccgttcgctcgccgctactgggggaatctcggttgatttcttttcctcggggtacttagatgtttcagttcccccggttcgcctcattaacctatggattcagttaatgatagtgtgtcgaaacacactgggtttccccattcggaaatcgccggttataacggttcatatcaccttaccgacgcttatcgcagattagcacgtccttcatcgcctctgactgccagggcatccaccgtgtacgcttagtcgcttaacctcacaacccgaagatgtttcacttcagagttgcgaaaatttgagagactcacgaacaactttcgttgttcagtgtttcaattttcagcttgatccagatttttaaagagcaaaacttcgcagtgaacctttgcaggtacactctgaagtattttttatttaatcactacagagatggtggagctatgcgggatcgaaccgcagacctcctgcgtgcaaagcaggcgctctcccagctgagctatagccccataacatgtagttaaaacctcttcaaatttgccgtgcaaatttggtaggcctgagtggacttgaaccaccgacctcacccttatcaggggtgcgctctaaccacctgagctacaagcctgtagaggttttactgctcattttcatcagacaatctgtgtgagcactgcaaagtacgcttctttaaggtaaggaggtgatccaaccgcaggttcccctacggttaccttgttacgacttcaccccagtcatgaatcacaaagtggtaagcgccctcccgaaggttaagctacctacttcttttgcaacccactcccatggtgtgacgggcggtgtgtacaaggcccgggaacgtattcaccgtggcattctgatccacgattactagcgattccgacttcatggagtcgagttgcagactccaatccggactacgacgcactttatgaggtccgcttgctctcgcgaggtcgcttctctttgtatgcgccattgtagcacgtgtgtagccctggtcgtaagggccatgatgacttgacgtcatccccaccttcctccagtttatcactggcagtctcctttgagttcccggccggaccgctggcaacaaaggataagggttgcgctcgttgcgggacttaacccaacatttcacaacacgagctgacgacagccatgcagcacctgtctcacggttcccgaaggcacattctcatctctgaaaacttccgtggatgtcaagaccaggtaaggttcttcgcgttgcatcgaattaaaccacatgctccaccgcttgtgcgggcccccgtcaattcatttgagttttaaccttgcggccgtactccccaggcggtcgacttaacgcgttagctccggaagccacgcctcaagggcacaacctccaagtcgacatcgtttacggcgtggactaccagggtatctaatcctgtttgctccccacgctttcgcacctgagcgtcagtcttcgtccagggggccgccttcgccaccggtattcctccagatctctacgcatttcaccgctacacctggaattctacccccctctacgagactcaagcttgccagtatcagatgcagttcccaggttgagcccggggatttcacatctgacttaacaaaccgcctgcgtgcgctttacgcccagtaattccgattaacgcttgcaccctccgtattaccgcggctgctggcacggagttagccggtgcttcttctgcgggtaacgtcaatgagcaaaggtattaactttactcccttcctccccgctgaaagtactttacaacccgaaggccttcttcatacacgcggcatggctgcatcaggcttgcgcccattgtgcaatattccccactgctgcctcccgtaggagtctggaccgtgtctcagttccagtgtggctggtcatcctctcagaccagctagggatcgtcgccttggtgagccgttaccccaccaacaagctaatcccatctgggcacatccgatggcaagaggcccgagggtccccctctttggtcttgcgacgttatgcggtattagctaccgtttccagtagttatccccctccatcaggcagtttcccagacattactcacccgtccgccactcgtcagcgaaacagcaagctgtttcctgttaccgttcgacttgcatgtgttaggcctgccgccagcgttcaatctgagccatgatcaaactcttcaatttaaaagtttgatgctcaaagaattaaacttcgtaatgaattacgtgttcactcttgagacttggtattcatttttcgtcttgcgacgttaagaatccgtatcttcgagtgcccacacagattgtctgataaattgttaaagagcagttgcgacgcggctttcagctcactgtcgcgaggtggcgtatattacgctttcctctttcagagtcaaccctgaatttcaggatttttttctcttcgttgttccgaccatcctgtgaagtgtttcacgttgtcgtctcaacggaggcgcattatagggatcccaattttttgcacaagtatttttttgatctttttttctgtttgttgttttttcaccctttttgctgcaatcgcacacaaaacggtgcttttttgcatactaaaagacttgcacaaggccaataatgcccccaaagtcattagtaaatcatttattgctgaggtaagtatgtctgatgttttacgcccataccgcgatctttttccacaaatcggtcagcgcgtaatgatcgacgatagcagtgtcgtgattggtgacgttcgtctggctgatgatgtggggatctggccgctcgttgtgattcgtggagatgtacattatgtacagatcggagcacgcaccaatatccaggatggcagtatgttgcatgtcactcataaatccagctacaacccagatggcaacccattaaccattggcgaagatgtcactgttggtcacaaggtgatgctccacggctgcaccattggcaatcgagttttggttgggatgggcagtattttacttgatggcgcaatagtagaagatgatgtgatgattggtgcgggtagtctggtcccacaaaataaacggctggagagcggatatctgtatctcggtagccccgtcaaacagatccgcccgttaagtgatgaagagaaggctgggttacgctattccgcgaataattacgtgaaatggaaggacgaatatctggatcagggtaaccagacccagccttgatcatcttcactttgttcctgaattaagttttccgcttcttcttccaggtcccagcgatgctgacgaaaactcgctaaccactgttctggcgtatctccagtaaagcgatacgccagactctcgccagagatcgcgcatgtcagttgcataccattcacgagagcgggaaaacatacacattttttattctcgtcccactcttccctgtccggaaactggatggcctgattcacgcggacaattcctcctgcaattgctttataactggttctacgtcaggcagaacaccgtgccagagaagaaaggcatgagccgcctgtgccaccagcattcctaaaccatcagcattacgcttactgcctcgctgctcacaccatgccagaaaaggagtttttcctttctgatagaacatgtcatagcaataaatgcctggatgaatgaggctactcgggatcgccggaatatcaccactgatgccactggatgttgcattaataatgagatcaaactcatgaccttccagttcgtccatactcaacgcctgaatactgccagtgtgcgcaaacaatttagccaactcttccgcgcgggataccgtccgattagttattgtcaccgcacagtccagggaaaggagtggcagtagtacgccgcgagatgctccaccagcgccgataagcagaatacgtaaaccagggcggataaaagacagacgttccagatcgcttaacaagcctacaccatcggtattgtcacccagcaggcgtccatcttctaaccgcatgagggtattaacagcaccagccaacgctgcccgttcagtaagctcatccgctctggcaaaagcctcttctttaaaaggcaccgtcacattcgcacctttaccaccagcactaaagaaagcgttcagtgtgttgatgaaatcattgatgggtgccaacacgcgcccatagggatgttcaatattcagttgctgagcaaattgctgatgaatgaatgggcttttgctgtgggctatcggattaccaaaaacagcataggtttccattatgttacccctgtcgaaacagttcacccgtcagggcatcgcggatttcactaggatttaaacgcccccccgtttcaccaggcacaaccgggaacgccgcgccaaattgtgcgcgaacttcgtctactgttcgacaaggtggcaatccactcaagttggcactggtagaaaccagcggtttaccataagcctggcacaaagcaaccaccaacggatggtcggtgactcgtacagcaaggctatcaaagcggcccgtcaaccagcgcggtgttgtcgcaggcgcgggaaagacaaaggtgacaggacctggccagcgggaaaaaatggtttcacgctgcacgtcagtcaacatggtgtcatcaatatagggtttaagctgctcgtaatttgctgcgattaaaatcagccccttatcaaccggacgctgttttaactccaacagtcgcatcactgctgtttcgctatcaggatcgcacccaacaccgaaaacggcttccgttggataggcgatgacacgttcttcattgagaacatctatcgcagctgcgatagcgtctctttgcaggttattattcacgttattattccgcgctaaccggctttccacattgtttactggcacaaaagtgttttacaccctgcgcggttttcttttcgatgagtagcggataatgacactcagggcattctccagctatgggtttgaagttaatggcaaattgacactccgggtagcgatcacaagagtgaaatgttttgccataacgggagcggcgctggaccagatggcccgtccgacattgggggcatgtaattgctgtttcgtccggtttatcgataagttcggtatgttcgcattcagggtagttaatgcaaccaataaacataccaaagcgtccctggcgtaataccagatttgcgccacatgcagggcaaacctgcccctccagaactttgacgatatgtccatccgcactagatttcagaggacggacgtagtcacacgccggatactgactgcatccaagaaacggaccgtgtttcccggatcgaataaccagttcagccccgcactttgggcaggactcattattacgcaccgtgaacagtgcacttttcgccataacaacttatgctgaattaaagaaatgattaatgcagcataccttcattcacttcaaagagtaattcttccatttgctggtacgcattttcgcagcccggaatattgaacaacaccatcaggatcacccatttcagatcatccagttcgaactctgcgttatccagcgcgagcactcgctctatcaccatttcacgagtttcaaggttgagcacctgaatctgctcaaggaaaagcagaaacccacggcagctggcatccagtcgttcacactcttccggtgtataaatacgcatggagagaggatcgctggccagttgcatcggttctgccaacccttcctgataatcagcaagtttttccagccatagcagggcattgtagatatcttctcgctcaaaacctgcgtcggtaagatcctgttcaagtttgtcttgatccacacgcaactcagcttctgtgtgaatataggtttcaaacaaatacattagtacgtcgaacatggcatgccctcctcaatcggacatagccgccgggtacagctgcgatccatcctgctaactccagttcgagtagttgagtaactacctctggcacaggttggccggcacgttcagcgacgacgtcaacaggtgttacctcatctcctacgttagccaggagctcaggaaatggcaatgccacgtcttgctgatctggactataaaaactattttcaggggcgtctggcaaccagtgcaatccaaattgcaagttttccagaatttcttccggttccgtcacaagaatcgcaccttgttttattaaccagtgaggcccttcgcttcccggattccctattggacctggcaaggcaaaaacttctcgcccctgctcaagcgcacaacgtgctgtcaccaggctaccactacgcaaagccgcttccaccaccagtacacctttacttagaccactgataatgcgatttcttcgtgggaaattgtaagcaaggggtggaacatcgaggggaaattcgctgacgagagcgcccccctgttcaagcagactggcagccagtcgggcatgacggcggggatgaatggtattaagtccattccccaatacagcaatgctgacgccatttacctgtaaggctgctttatgcgctacaccatcgattccacgcgccagtccactcgtaattgtcactccacgcgtcgccagagtttcgcaaaataatcgtccccatcgctcgccataccaactatgcgcccgactccccactacggcaagctgaaaactatgcagcgcgtgcagttctccttcaacaaacagtgcgccggggtaatctgtcgtcgccagaagttgaggaggataaaattcgctgtccgcaggaattaaatgatggttgggttgctccaaccaacaaagactgctttcgatactctttcgtggaaaactaagaaagcgttgtgcctgccgcaatgtaagccctgtttgctgcaatacaaccgcatcaatatggctctgttttgccacccagtgagcgatacggaccatatcatcgccgtacaagctgctgatactcattaaacgcagccaaatttctgtatcgaccatccttatctccctgccataagcagccttagcaatctttgcgattggtcagtgatgctgtcaatcagagggggatttgtctagaatagaagaaataatctttctaactcctgaacacatctctggagatttatgagtgttttgcaagtgttacatattccggacgagcggcttcgcaaagttgctaaaccggtagaagaagtgaatgcagaaattcagcgtatcgtcgatgatatgttcgagacgatgtacgcagaagaaggtattggcctggcggcaacccaggttgatatccatcaacgtatcattgttattgatgttagcgaaaaccgtgacgaacggctagtgttaatcaatccagagcttttagaaaaaagcggcgaaacaggcattgaagaaggttgcctgagcatccctgaacaacgtgctttagtgccgcgcgcagagaaagttaaaattcgcgcccttgaccgcgacggtaaaccatttgaactggaagcagacggtctgttagccatctgtattcagcatgagatggatcacctggtcggcaaactgtttatggattatctgagtccgctgaaacaacaacgtattcgtcagaaagttgaaaaactggatcgtctgaaagcccgggcttaaggataagaactaacgtgagtgaaagtctacgtattatttttgcgggtacacctgactttgcagcgcgtcatctcgacgcgctgttgtcttctggtcataacgtcgttggcgtgttcacccagccagaccgaccggcaggacgcggtaaaaaactgatgcccagcccggttaaagttctggctgaggaaaaaggtctgcccgtttttcaacctgtttccctgcgtccacaagaaaaccagcaactggtcgccgaactgcaggctgatgttatggtcgtcgtcgcctatggtttaattctgccgaaagcagtgctggagatgccgcgtcttggctgtatcaacgttcatggtagtctgctgccacgctggcgcggtgctgcaccaatccaacgcagtctatgggcgggtgatgcagaaactggtgtgaccattatgcaaatggatgtcggtttagacaccggtgatatgctctataagctctcctgcccgattactgcagaagataccagtggtacgctgtacgacaagctggcagagcttggcccacaagggcttatcaccacgttgaaacaactggcagacggcacggcgaaaccagaagttcaggacgaaactcttgtcacttacgccgagaagttgagtaaagaagaagcgcgtattgactggagtcttagcgcagcacagcttgaacgctgcattcgcgctttcaatccatggccaatgagctggctggaaattgaaggacagccggttaaagtctggaaagcaagcgtcattgatacggcaaccaacgctgcaccaggaacgatccttgaagccaacaaacaaggcattcaggttgcgactggtgatggcatcctgaacctgctcagcttacaacctgcgggtaagaaagcgatgagcgcgcaagacctcctgaactctcgtcgggaatggtttgttccgggcaaccgtctggtctgatagtccactcttctaagcccggtcttgccgggcgtttttatacttatgaaaaaacaacgtaatttacgtagcatggcggcccaggccgttgaacaagtcgtcgagcaagggcaaagtttaagcaacattctgccaccgctccagcaaaaagtttccgataaagacaaagcacttcttcaagagttgtgctttggcgtactgcgtacgcttagccagttagactggctgattaataagttaatggcccgtccgatgaccggcaaacagcggaccgtgcattacctgattatggttggtttgtatcaactgctttatacccgcattccacctcatgctgcgctggctgaaacggttgaaggcgctatcgcaattaagcgtccgcaacttaaagggttgataaacggtgtattacgccagttccagcgtcagcaagaagagttattagccgagtttaatgccagtgatgcacgttatctgcatccttcctggttgctgaagcgtctgcaaaaagcgtatccagagcagtggcaatccatcgtcgaagccaataaccagcgtccgccaatgtggctgcgtattaatcgtacgcatcattcccgcgacagctggcttgcattgctggatgaagcaggaatgaaaggtttcccgcatgcggattaccctgatgctgtacgtctggaaacacctgcacctgttcatgcgctacctggttttgaagacggatgggttaccgttcaggatgcaagtgcacaaggttgcatgacctggcttgcgccacaaaacggtgaacacattttggatctttgtgccgcccccggcggtaaaacaacgcatatccttgaggtggcaccagaagcgcaggttgttgcggttgatatcgacgaacagcgcctctctcgggtttacgacaatttaaaacgccttggtatgaaggcgaccgtgaaacaaggtgatggccgttacccttctcaatggtgtggcgagcaacagtttgatcgcattttattagatgcgccttgtagtgcaaccggtgtgattcgtcgccatccagatattaaatggttacgtcgcgatcgcgatatcccggaactcgcgcaattgcagtctgaaattctcgacgccatttggccgcatttaaaaaccggtggaactctggtctatgccacctgtagcgtgttaccggaagagaatagcctgcagattaaagcctttttgcaacgtaccgctgatgccgaactttgcgaaacaggaacaccagagcaaccgggtaaacaaaatctacctggtgccgaagagggcgacggcttcttttacgctaagctaatcaaaaagtgatgagataacgggtcgcgactgatgaaaattatcattctgggtgccggccaggttggcggcacactggcggaaaacctggttggcgagaacaacgatattactgttgtcgataccaacggtgagcgtctgcggaccttacaggataaatttgacctgcgggtcgtgcaggggcatggctctcatccacgcgtattgcgggaggcaggtgccgacgacgccgatatgctggttgctgtaaccagtagtgatgaaaccaatatggttgcctgccaggtagcctacagtcttttcaacacccctaatcgcatcgctcgtatccgcagtccagactacgtgcgcgatgccgataagctatttcatagtgatgctgtgccgattgatcatctgatcgcaccagagcagttggttatcgataatatttaccgactgattgagtatcccggcgcattgcaggtggtgaacttcgctgagggtaaagtcagcctggctgtggttaaagcctattatggcggcccgctgattggtaatgcacttagcaccatgcgcgaacatatgccacatatcgatactcgtgtggcagcaattttccgccacgatcgccccattcgtccgcaaggtagcaccattgttgaagctggtgatgaagtgttctttattgccgctagtcagcatatccgcgcggtgatgagtgaattacagcgactggaaaaaccgtataagcggatcatgctggttggtggcggtaatatcggtgcagggctggcgcgtcgtctggaaaaagattacagcgttaaactcatcgaacgtaatcagcagcgcgctgccgaactggcggaaaagttacagaatacgatcgtcttttttggtgatgcgagcgatcaagaactactggccgaagaacatatcgatcaagttgatctgtttattgccgtcaccaacgatgacgaggccaatatcatgtccgccatgcttgccaaacgtatgggtgcgaaaaaggtgatggtattgatccagcgtcgcgcttatgtggatctggttcaggggagcgttatcgatattgcgattagtccacaacaagcaactatttctgcgttgcttagccatgtgcgaaaagcagatattgttggtgtttccagtttgcgccgcggcgtagcagaagctattgaagccgttgctcacggtgatgaaagcaccagtcgcgttgtcggcagagtcattgacgaaatcaagctaccgccaggaacgattattggagcggtggtacgtggaaacgacgtgatgattgccaatgacaatctgcgcattgagcaaggcgatcacgtaattatgttcctcacagataaaaagtttattaccgacgtcgaaagactcttccagccaagccctttcttcttgtaattaataaggcgtctaatgacgccttattatttccctttgattatcaaggattaattaaattcattcctggcaggaaaatggcttaacatttgttagacttatggttgtcggcttcatagggagaataacatgagcattattaaagaatttcgcgaatttgcgatgcgcgggaacgtggtggatttggcggtgggtgtcattatcggtgcggcattcgggaagattgtctctagtctggttgccgatatcatcatgcctcctctgggcttattaattggcgggatcgattttaaacagtttgctgtcacgctacgcgatgcgcagggggatatccctgctgttgtgatgcattacggtgtcttcattcaaaacgtctttgattttctgattgtggcctttgccatctttatggcgattaagctaatcaacaaactgaatcggaaaaaagaagaaccagcagccgcacctgcaccaactaaagaagaagtattactgacagaaattcgtgatttgctgaaagagcagaataaccgctcttaacaagcgccactaagcagaagaccagtggtaaaaaagtgatttactttcttgccactggcctcccagttcccccgattgccatgttttccttttcgcatgtaactgcctttccccttcttatttttctctacgcgctgtcggaataagggatcatgtagtaatgcttctatcgcattatcctttatctgccctttagtatgctgatatcgactcataaaaactccagttggttatttaacggcgcgagtgtaatcctgccagtgcaaaaaatcaacaaccactcttaacgccactcgccccttgttcaagagcttcaagaatgctacaataaacactgctatgagcagtcccacaacaggcatcgttaaggcgttgcaaggaacgctgcatactctgcaactcggctatccgtgcttcgacttcctgcaatctttcctgcacaatgcctttactctcctgacaggtatggtgttcaggatcgatgcggatgctcagcaactcgcggatgctctccagactgaaacctagttgtctggcatggcggataaatttcaatcgctggagatcgctttcggtatataggcgaaacccaccttcagtacgcacttcatgctccatcatctgctgtttttcgtaataacgaatcgtgtcgggtgttacttccgccatttttgccagctcaccaatgcgatacatacatactccattagttatcgttgattttgtccaacaacttgtcagcataatcgccgcgtaaaaaatcggtactcaatccagcttgtcgcagcttcaattccagtaaactcaatcgacggctaacctcttgatattgcggatcatcgtgacggatacctttgagaatatccagaagctgaattgcttctctccgttgctcaagttctggcggtaagcaaccggcattcttcagcaagcgataccccgcacgtaattccggtggcacgtgagaatcatcatccagtatcaatggttcgccgctacctgccaggttatcaaactcacctttcgcttgcgcttctgctatatggcgctctgcccactggtcaagtaaccacataaatactccaggggatgaacaaaaagagtacagctattgtagataagtggggatactacgggtataaaaaaacccgccggggcgggtttttttacgttgcttcagattactctgcagcagcttctgctttctcactacgatcaaccagctcgatgtaagccatcggcgcgttgtcgcctgcacggaagccacacttcagaatacgagtgtaaccaccggcacggctcgcgaaacgcgggcccagttcgttaaacagttttgccacgatctcgttatcacgagtacgggcgaatgccagacgacgattagcaacgctatcagtcttggcaagagtaatcagcggctcaactacgcggcgcagctctttcgctttaggcagagtcgtcttgatgatttcatgacgaaccagactacctgccatattgcggaacatagcctggcgatggctgctgttgcggttcagttgacgaccactcttacgatggcgcatgaccttatccttctcagtaaaaccttaacctgtgatccggttactcgtcagcgatgcttgccggtggccagttttccaggcgcatgcccagagacagtccacgggaagccagcacgtctttaatctcagtaagagattttttaccaaggttaggcgttttaaggagctcaacctcggtacgctgtaccagatcaccgatatagtggatagcttctgctttaaggcagttagcagagcggacagtcaattccagatcgtcaacagggcgcagcaggatcggatcgaactctggtttctcttctttcacttcaggctgacgtacatcacgtaagtcaacgaaagcttccagttgttcagccagaatggttgccgcacgacgaatcgcctcttcaggatcgattgtgccgttggtttccatttcgatgaccagcttgtccaggtcggtacgctgttctacacgcgctgcttcaacattgtaggcaatacgctccacagggctgtagcatgcgtcgaccagcagacggccgattgggcgctcatcttcttcgctatgaattcgggtagaagccggcacataaccacgaccgcgctgaactttgatacgcatgctaatagacgcgttctcatcggtcaggtggcagatcacgtgctgcggcttgacgatttcgacatcaccgtcgtgggtgatatcggctgcagtcacagggccaatgccagatttattcaaggtaagaataacttcatctttgccctgaactctcaccgccagccctttcaggttgagcaggatttccaggatatcttcctgaacgccttctttggtgctgtactcatgtagtacaccatcaatctcaacctcggtcaccgcgcaacccggcatgctactgagcagaatacggcgcagtgcgttacccagagtatggccaaagccacgctctaaaggctcaagggtcaccttggcgtgcgtgctactcacttgctcgatatcaaccaggcgcggttttagaaactctgtcacagaaccctgcattgtgtcctctctttggtactaagctttacttggagtaaagctcgacgatcaggtgttcgttaatgtccgcagacagatcagaacgctccggcttacgcttaaacgtaccttccatcttgccagcatcaacttccagccaggttggcttttcacgctgctcagccagctccagagcggctttcacgcgagactgcttcttcgctttctcacgaatgcttacaacgtcattcggactaacctgataagaagcgatgttaacaacacgaccgtttaccataattgctttatggctaaccagctgacgtgcttctgcacgagtggcaccgaagcccatacggtatacaacgttgtccagacgaccttccagcagagccaacaggttttcaccggtgttgcctttcagacgtgctgcttctttgtagtagttacggaactgacgctccagcacaccatagatacggcgaactttttgcttttcacgcaactgcacaccatagtcagacagacgcggtttacgcgcaccgtgctggccaggagcttgttcaattttacacttggtatcgatcgcgcgaacgccagacttaaggaataagtcggtgccctcacgacggctcagcttgagcttaggacccaaatatcttgccattttctttctccaacaaacctggaaaacgaggcgttatacgcgacgttttttcggcggacgacaaccgttatgagggatcggagtcacatcagtaatgttagtgatgcggaaacctgcggcgttcagagcacgaatagtagattcgcggcctggacccggacctttaaccataacttccagattcttgatgccgtattctttcacggcgtcagcgcaacgctctgctgcaacctgagctgcaaacggagtggatttgcgagaaccacggaaaccggaaccaccggctgttgcccaacccaacgcgttaccctgacgatcagtgatagtcacgatggtgttgttgaaagaagcatggatatgagccacgccgtcagagacttgttttcttacacgtttacgtgcacgaattggtgcctttgccattattcaatcaccccgattatttcttgatcggtttgcgcggacccttacgggtacgtgcgttggtcttggtacgctgaccgcgaaccgggagaccacgacgatgacgcaaaccgcgatagcaaccaagatccatcaggcgcttgatgctcatgctgatttcacggcgcagatcaccttcaacgacaaatttggcaacttcgtcacgcagcgtgtcgatttgtccttcagacagctcactgatcttaacatcttcagcgatacccgctgcagccaggatggctttagaacgggtcttgccgacgccataaatgctagttaatgcgattacggcatgcttatgatcaggaatgttaatgcctgctatacgggccactatgcactcctactatttaatatgtacgttccatgctgaaaagcccgttttcaggatactcaaatggaaacgcacagacatacaaaagattggctggctaatctagccagctcaacccaactttgcaagaaaaatatgcgaaaaaatcagccttggcgctgtttatgcttcggctcggcactgcaaatcacacggatgacaccatcacgcttaacgattttgcagttacggcataatttcttgacggaagcacgaactttcatttttactctccgtaacttctcgggcgaccaattatcggccgtagcctttcaggttcgccttcttcaatgcagactcatactgactggacatcatcagagtttgcacttgagccataaagtccataatcacgacaacaacgataagcagactggtcccaccgaagtagaacggtactttcattgcatcacgcatgaactccgggatcaggcagataaaggtaatatacagcgcaccaaccagggtcaggcgggtcattactttatcgatatacttcgccgtttgctctcccggacgaattcctggtacaaatgcaccggacttcttcaggttatctgctgtttcacgcgggttgaaaaccaacgccgtgtagaagaaacagaagaagatgattgcagacgcatagagtaacacataaagcggttgcccaggctgcaaatacaggctaattgttgtcagccagttccaaccagtaccgcccccgaaccaactcgcgatggtcgccgggaacagaataatactggaagcgaagattgccgggattacccccgccatattcactttcagcggtaaatgtgtgctctgtgcagcatagacacgacgaccttgctgacgtttcgcgtagtttaccacaatgcggcgttgaccacgctcaacaaatacaacaaagaacgtcactgcaaatactaatactgcaaccaacagcaacacgaggaagtgcaggtcgccttgacgcgcttgctcgatagtatgggcaatggctggcgggagtcccgcgacaataccggcgaagataatgatactaataccgttgccgatacctcgttcagtaatctgttcgcccaaccacatcaggaacatggttcctgtgaccagacttacaacagcggtgaagtagaatgcaaagcccgggttaatcaccaggccttgcataccaggcatattcggcagaccggtagcaataccgatgctctggaatattgccagcaccagagtaccgtagcgggtgtactggctgatcttacgacgaccagactccccttctttcttaatttctgccaacgttgggtgaaccaccgtcagcagctggataatgatgctcgcgctaatatacggcatgatccccagagcaaagatagaagcacggctgagagcaccaccagagaacatgttaaacatctcaatgatggtgcctcgctgttgctcaagcagtttggcaagtacagcggcatcaataccagggatcggaataaaagagccaatacggaacacaatcagcgcaccgataacaaacagcagtctgcgtttcagctcgcctaagccacctttggcactttgaaaatctaatcccggttgtttagccatctgctacttattcctcgattttaccgccagcagcttcgatagcagcacgagcgcctttagtaacacgcaggccacgaacagttaccggagtcgttacttcgccagccaggatcactttcgcgaactcgatctggataccgataatgttagccgctttcagcgtgttcaggtctactacaccgccttctactttagccaggtcagacagacgaatttcggctgtaatcgctgctttacgagaagtgaagccgaatttcggcagacgacggtacagaggcatctgaccaccctcgaaaccgcgacgtacgccaccgccagaacgagacttctgacctttgtgaccacgaccaccggttttaccgaggccagaaccgataccacgacccaggcgtttacccgcctttttggagccttcggccggagacagagtatttaaacgcatctcttactcctcaactttaaccatgaaggaaaccgcgttgatcataccgcgaatagcaggagtatcctcgcgctctacggtgtgaccaatacgacgcagacccaggccaagcagcgttgccttgtgtttcggcagacgaccgattgcactgcgggtttgagtaattttaatagtctttgccatggtttatttccccagaatttcttcaacggatttaccacgcttggcagcgaccatttctggagaattcatattttccaggccatcaatagttgcacgaaccacgttgatcgggttggtggaaccataggctttagccagaacgttatgaaccccagcgacttccagaacggcgcgcattgcaccaccggcgatgataccggtaccttcggaagccggctgcatgaatacgcgagaacccgtgtgaacacctttaacagggtgttgcagagtgccgttattcagcgcgacgttaatcatattgcgacgggctttttccatcgctttctggatcgctgctggaacttcacgcgctttaccgtaaccaaaaccaacgcgaccgttaccatcgccaactacagtcagagctgtgaaggagaaaatacgaccacctttaacggttttagatacgcggtttaccgcgatcagcttttcctgcagttcgccagcttgtttttcgatgtgagccatcttacacctctaccttagaactgaaggccagcttcacgggcagcatctgccagtgcctggacacgaccatgatattggaacccggaacggtcaaaggatacatctttgatgcctttttccagagcgcgttcagcgacagctttacccacagctgcagccgcgtctttgttaccggtgtacttcagttgttcagcgatagctttttctacagtagaagcagctaccagaacttcagaaccgttcggtgcaattacctgtgcgtaaatgtgacgcggggtacgatgtaccaccaggcgagttgcgcccagctcctggagcttgcggcgtgcgcgggtcgcacgacggatacgagcagatttcttatccatagtgttaccttacttcttcttagcctctttggtacgcacgacttcgtcggcgtaacgaacacccttgcctttataaggctcaggacgacggtaggcgcgcagatccgctgcaacctggccgatcacctgcttatcagcgcctttcagcacgatttcagtctgagtcggacattcagcagtgatacccgcaggcagctgatggtcaacaggatgagagaaacccagagacaggttaatcacattgcctttaaccgctgcacggtaacctacaccaaccagctgcagcttcttagtgaagccttcggtaacaccgataaccatactgttcagcagggcacgcgcggtaccagcctgtgcccaaccgtctgcgtaaccatcacgcggaccgaaggtcagggtattatctgcatgtttaacttcaacagcatcgttgagagtacgagtcagctcgccgtttttacctttgatcgtaataacctgaccgttgatttttacgtcaacgccggcaggaacaacgaccggtgctttagcaacacgagacattttttcctccgattaggctacgtagcagataatttcgccaccaagaccagcctggcgcgctgcacgatcagtcataacacctttagaggtagaaacaactgcgatacccagacccgccataactttcggcagctcatctttacgtttatagatgcgcagacctgggcggctgacacgctgaatgctttctacaacagctttgccctggaaatacttcagagtaagttccagttcaggcttggtgtcgccttcaactttaaaatcttcaataaaaccttcttccttcagcacgttggcgattgccactttcagcttggaggaaggcatggtgaccgcagctttgttcgcggcctgaccgttacggatacgggtcagcatatccgcgatcggatcttgcatgctcatctgtctttactcccgtgattcaattggtgacaattaccagctagcctttttcagacccgggatttcaccgcgcatagcggcttcacggaccttaatacggctcaacccgaacttccgcaggaaaccatgcggacgacctgtttgacggcagcggttacgctgacgagacgggctggaatcacgcggcagagtctgcagcttgagaacagcgttccaacgatcttcgtcggaagcgttcacatcagagatgatcgctttcagttcagcgcgtttcgcgaagtatttatcagctaaagctacgcgttttacttcgcgtgctttcatactttgcttagccatttagtaaccctaccttacttgcggaacgggaagtcaaaggcagccagcagagcgcggccttcttcgtcagatttcgcagtagtggtaatggtaatatccaaaccacgaacgcggtcgactttatcgtagtcgatttctgggaagatgatctgctcacggacacccatgctgtagttaccacgaccgtcgaaagacttagcggacaggccacggaagtcacggatacgaggtacagcaatagtgatcaggcgctcaaagaactcccacatgcgttcgccacgcagagttactttacagccgatcggatagccctgacggattttgaagcctgcaacagatttgcgtgctttggtgatcagcggtttttgaccggagattgctgccaggtctgctgctgcgttatccagcagttttttgtcagcgatcgcttcaccaacacccatgttcagggtgatcttctcgacccgagggacttgcatgacagaattgtagttaaactcagtcatgagttttttaactacttcgtctttgtagtaatcatgcagtttcgccatcgtactactccaaattacttgatagtttcgctgttagacttgaagaaacggacttttttaccgtcttcgaatctaaagcctacacggtcagccttgccggttgccgcattgaagattgctacgttggaaacctgaatagcggcttctttttcaacgatgccacccggttggttcagggccggaaccggcttctgatgtttcttaaccaggttgataccttcaacaatgaccttgccggaagacaggacattcttaactttaccgcgtttacctttatctttaccggttaacacgataacttcgtcatcacgacggattttcgctgccatgattcgctccttagagtacttctggtgccagagagataattttcatgaacttctcactacgaagctcacgagttaccggcccaaaaatacgcgtaccgataggctgctcgctgttgttgttcagaagaacacaagcattaccatcgaagcgaatgacagaaccgtccgggcgacgaacacccttcttggtgcgcaccactaccgccttcagcacatcaccttttttgaccttaccacgcggaattgcttctttgatggtgatcttgatgatgtcgcctacgcctgcgtagcgacggtggctgccacccagaaccttgatacacattacgcgacgtgcaccggagttgtcggcgacgttcagcatagtctgttcttggatcattttagtgctccgctaatgtcaactactactgagacccgaaaatcaggtcgttaaaaatccccatatcgagggcgcggcattataacaccgcttcaaggatatgggtagaaaaaataaacggctcatttctgagccgtttattcgtattgagagagtgtactgtattacagaaccgctttctctacaacgcgaaccagcgtccaggatttagtcttggacagcggacggcattcgcggatttcaaccacgtcaccgataccgcattcgttgttctcgtcatgtacgtgcagtttggtcgtacgcttgatgaatttaccgtagatcgggtgtttcacaaaacgttcgatagcaacaacaatggatttctccattttgtcgctaacaacgcgaccttgcagagtacggattttatcggtcattacgcacccgccttctcgttcagtaaagtcttaacgcgtgcgacatcgcgacgcacttgcttcaacaggtgagactgttgcagctggccacttgcagcctgcatacgcaggttgaactgctcacgcagcaggttcagcagctcggtgttcagctcttcaacgctcttctcacgcagctcttttgctttcattacatcaccgtcttagttacaaaggtggttttaatcggcagtttcgctgctgccagcttgaatgcttcacgggccagctcttccggaacaccgtccatttcatacaggactttacccggctgaatcaaggcaacccaatactccacgttacctttacctttacccatacgcactgccagcggcttttcagtgatcggtttgtccgggaacacacggatccagatcttaccttgacgcttaactgcacgggtcatagcacgacgtgctgcttcgatctgacgggcagtcagacgaccacggccaacagctttcagaccgaagctgccgaagctaacatccgtaccctgcgccagaccgcggttacggcctttgtgcattttacggaattttgtacgctttggttgtaacatcagcgacgctccttatttacggcctttacgctgctgctttttaggctgagcagccggtttttccggttgttcaacagcagccataccacccaggatctcgcctttgaagatccacactttaacgccgattacaccgtaagtggtgtgcgcttcagaggtgttgtagtcgatgtcagcacgcagagtgtgcagcggtacgcgaccttcgcggtaccattcggtacgtgcgatttccgcgccgcccagacggccgctaacttcaactttaatacctttagcgcccagacgcattgcgttctgtacagcacgcttcatagcacgacggaacataacgcgacgttccagctgagaagtgatgctgtcagcaaccagttttgcgtccagttcaggcttacgaacttcggcgatgttgatctgtgcaggaacgccagcgatgtccgctacgaccttacgcagtttttctacgtcttcaccttttttaccgataacgatacccgggcgagcagtgtgaatggttacacggatgctcttagccggacgctcgataacgatacgagatacggacgctttagccagttccttagtcaggtactgacgtactttaaaatcgctgtccaggttgtcagcgaattctttggtgttcgcaaaccaggtagagttccatggttttacaatacccaggcgaataccattaggatgtactttctgacccattgctagtctccagagtctcagcgatcggacacaaccacagtgatgtggctggtgcgcttcaggatgcgatctgcacgaccttttgcacgcggcataatgcgcttcatgctcgggccttcgtctacgaaaattttcgtaactttcagatcgtcaatgtcagcgccatcgttgtgttcagcgttagcaatggcagattccagaactttcttgaccagtacagccgctttcttgttggtgtaggtcaaaatatccagagcctggctcactttcttaccgcgaatcaggtcagcaacaaggcgaaccttctgagcagaagaacgagcatggcgatgtttagcgatagtttccatctcttcctcctaccttatttcttcttcgcttttttatcagcagcgtggccgcgataagtacgagtcggtgcgaattcacccagtttgtgaccaaccatttcgtcggttacaaataccggaacgtgctgacgaccattatggacagcgatggtcaaaccgatcatgttaggaaagatcgtactacgacgggaccaagtgcgcaggggcttcttgtctccgctttccaccgctttctctaccttcttcagcaagtgcaggtcaataaaaggacctttcttgagagaacgtggcatggcttatcctctaaaattatttgctacggcgacgtacgatgaatttatcagtacgcttgttgctgcgggtcttcttacctttggtctgaacgccccacggagttaccgggtgcttaccaaagttacgaccttcaccaccaccatgtgggtggtctaccgggttcatcgcggtaccgcgaacggtcggacgaacaccacgccagcgtgcagcacctgctttacccagaacgcgcagcatatgctcagcattgccaacttcgcccagagttgcacggcagtctgcttctactttacgcatttcaccagaacgcagacgcagggtgacataagcaccatcacgagcaacgatctgaacgtaagtaccagcggaacgtgccagctgaccgcctttacctggtttcatttctacgttatgaacagtagaaccaaccgggatgttgcgcatcggcagggtgttacctggtttgattgcagcatcaacgccagactgaatctggtcgccagctttcaggcctttaggggccaggatgtaacggcgttcaccgtctttgtacagaaccagcgcgatgttcgcggaacggttcggatcgtactcaagacgttcaacaactgccgggataccgtctttgttgcgtttgaagtcaacaatacggtaagcctgcttgtggccaccaccgatatgacgagtggtgatacggccattgttgttacgaccaccggatttgctgtttttttccagcaacggagcaaaaggtttgcccttgtgcagctcagggttaaccactttaactacgtggcgacgacccggagatgtcggtttacatttaacaactgccattgtattactcctccgacttactcagcgccgccaacgaagtccagattctggccttctttcagggtgacgtaagcttttttccagtcgctacgacgaccgatacgctgtccgtgacgtttaactttccctttaactaccagggtgttaacgacttcgacttcgacttcaaacagtttctgcacagcagctttgatttctgctttggtcgcgtctttagcaactttgagtacgatggtgttggatttttccatcgcagtagacgctttttcagaaacgtgcggtgcacgcagcaccttcagcagacgttcttcacgaatcatgccagcatctcctcaacttgcttaacagcatcagcagtcattacgactttgtcgaaggcgatcaggctaaccgggtcgataccagttgcatcgcgtacgtcaaccttgtgcaggttgcgcgcagccaggaacaggttttcgtccagctcaccggtgatgatcagcacatcttccagagccatgtctttcagtttctgtgccagcagcttagttttcggcgcttctacagagaacttctcgacaacgatcagacgatcctgacgtaccagttcggacaggatgcttttcagcgcgccgcggtacatcttcttgttaactttttgactgtggtcctgcggacgagcagcaaaggtcacgccaccagaacgccagatcgggctcttgatagaaccagaacgcgcacggccggtgcctttctggcgccacggttttttaccggaaccagttacttcagcacgagtcttctgagcacgagtaccctgacgagcaccagctgcataagcaacaacaacctggtgaaccagcgcttcgttgaaatcacgaccgaaggtagtttcggaaacagtcagcgcgctctgcgcgtctttcaatactaattccattgctatctccttacgccttcacagctggtttaacgatcaggtcgctaccggttgcacccgggacagcacctttaaccagcagcaggttgcgctcagcgtcaacgcgtactacgtcaaggctctgaacggttacacgttcgttacccatctgacctgccattttcttgcctttgaacactttgcccggagtctggttctgaccgatagaacccggaacgcggtgagacaaggagttaccgtgagtagcgtcctgggtacggaagttccagcgcttaacggtacctgcgaaacctttacctttagaggtgccagttacgtcaacttttttaacgtcagcaaacagttcaacgctaatgctctgacctacagtgaactcttcgccttcagccaggcggaattcccacagaccacggccagcttctacgccagctttagcgaagtggccagcttcaggcttggtcacacggttagcttttttagcaccggtggtcacctgaatagcacggtagccatcgttagccaggtctttaacctgagtaacgcggtttgcttcaacttcgattacggttactgggatagaaacgccgtcttctgtgaagatacgggtcatacccacttttttaccgactaaaccaatcattgtttcaacctctcaatcgctcaatgacctgattaacccaggctgatctgcacgtctacaccggcagccagatccagacgcatcagagcatcaacggttttctcggttggctcaacgatgtcaaccagacgcaagtgagtacggatttcgtactgatcgcgcgcgtctttgttgacgtgcggggagatcagaacagtgaagcgctctttgcgtgtcggcagcgggatcggaccacggacctgcgcaccagtgcgcttggcagtctcgacgatttccgcggttgcttgatcgatcagacgatgatcaaacgctttcaggcggatacggattctttggttctgcatgagaccagagctccaattattttataaacgaaaatgattactcctcagacccattacgattgatgggagagtgtaaccgttcttacgtagctccccgattgggagcattgttaggtagccaaattcggctaactgaggttcagattgaacctgctgtcaactacgacaagcccgcgcattatacatacttaaccaccgaacgcaagcgtattgctagtaaagtaaacagccttcgggttatctctcaagttcgttcagtgcatttttgacacgctctcttaaaccggctttctcttcgctttcttccacagtattttcttcgtcttcagaagaagagggggcattctcaaccgcgacgcctgggtcatcttcctcctcgacggattcgacgacggggagtggctgttttttgaagaaatagtgttgtgtactttgtttaaaagcgggcgtttcagcctctacagtgacttcggcttttactatccaaagcacccatagctgcctggcatacccaccaaccagcaccattcctgcaaaccacaggcaaatcagtaataaacaaattacatatattatggtgctgtgtttttgtcgggagaagataccagggtgacctgtttctttctgctcacgcgcggcgatatagaattcaaacattataatcccttgtgacgtaaaaactgcaaaacaaaagtcctacgcaggaattatttacgttttacgagaacccttcaatatgaattaaattacggcattaaaaataagaaaaaagcctgacaaatgaagcattttaaaaacagaaacattcatatttaaaatgttaaattgaattgatattttaaatatgaataatttattcgttctgacagtacgaataagatatgccgtcaacaaatgcaaaaagggcgccgaagcgcccttttcaattcaaaactaattaacgtgtaattagcccagaactttagcaacaacgcccgcgccaacggtacggccgccttcacggattgcgaaacgcagaccgtcgtccatcgcgatcgggtggatcagggtaacaaccattttgatgttgtcgcccggcattaccatctctacgccttccggcagttcgatggtaccagtcacgtcagtagtacggaagtagaactgcggacggtagcctttgaagaacggagtatgacggccgccttcatctttggacagaatgtacacttcagattcgaacttggtgtgcggcttgatggtgcccggcttagccagtacctgaccacgttcgatttcttcacgtttgataccacgcagcagaacacctacgttctcaccagcacggccttcgtccagcagtttgcggaacatttcaacgccagtacaggtagacttctgagtctctttgataccaacgatttcaacttcttcaccaactttgatgataccgcgttctacacgaccggtaacaacggtaccacgaccggagatggagaatacgtcttcgatcggcagcaggaacggcttgtcaatcgcacgctctggttccggaatataagaatccaggaagccagccagttccaggattttcgcttcccactctgcgtcgccttccagcgctttcagagcagaaccacgaacgatcggagtgtcgtcgcccgggaagtcgtactgagacagaagttcacgaacttccatttcaaccagttccagcagctcttcgtcatcaaccatgtcgcatttgttcaggaacacgatgatgtacggaacgcctacctgacgacccagcaggatgtgctcacgagtctgcggcatcgggccgtcagtcgcagcaactaccaggatcgcgccgtccatctgagcagcaccggtgatcatgtttttaacatagtcggcgtgccccgggcagtctacgtgtgcgtagtgacgggtcggggtgtcgtattcaacgtgagaagtgttgatggtgataccacgagctttttcttccggcgcgttatcgatctggtcgaatgcacgagcagcaccgccgtaggttttagccagtacggtggtgattgcagcggtcagagtagttttaccgtggtcaacgtggccgatagtaccaacgttaacgtgcggttttgtacgttcaaatttttctttagacacggctatattccttactatagtgctctccccttcaggagagagcacgggactttggtattaacccttaggcttatttaccacgggcttcaattacggcctgagcaacgttactcggcgcttcatcatacttcaggaattccatagtgtaacttgcacgacctttggtcagagaacgcagctgagttgcgtatccgaacatttcagacagcggtacttcagcgtggatcttaacgccagtaacttcagattcctgacctttgagcataccacgacgacggctcaagtcaccgataacgtcaccggtgttctcttccggagtttctacttcaaccttcatgatcggctcaagcagaactggtttcgctttcttaaagccttctttaaaggcgatagaagcagccagtttaaacgccagttcagaggagtcaacgtcatggtaagaaccgaagtgcagacgaatacccatgtctactaccgggtagcctgccagcggacctgctttcagctgttcctggatacctttatcaacggccgggatgtattcgccagggattacaccacctttaatgtcgttgatgaactcgtagcctttcgggttactacccggctccagcgggtacatgtcgataacaacatgaccatactgaccacgaccaccagactgtttcgcgtgtttaccttcaacatcggtaactttctggcggatagtttcacggtaagcaacctgcggtttacctacgttcgcttcaacgttgaattcacgcttcatacggtcaacgatgatgtcgaggtgcagttcgcccatacccgcgatgatggtctggttagattcttcgtcagtccatacacggaaagacgggtcttctttagccagacggcccagagccagacccattttttcctggtcagctttggttttcggttcaactgcgatggagattaccggctcagggaattccatacgttccagaatgatcggcgcatccgggtcacacagggtgtcaccagtggttacgtctttcagaccgatagcagcagcgatgtcgcccgcgcgaacttctttgatctcttcacgtttgttagcgtgcatctgaacgatacgaccgaaacgctcacgtgcagctttcacggagttcagtacggtatcaccagagttaaccacaccggagtaaacacggaagaaggtcaggttaccaacaaacgggtcggtagcgattttgaacgccagtgcagagaacggctcgtcatcacttgcgtgacgttcagccggagtgtctttaccgtcgtccaggataccgttgatcgcaggtacgtcaaccggggatggcaggtaatcaattaccgcatccagcatcgcctgaacacctttgttcttgaacgcagaaccacaggttaccaggatgatttcgttgttcagaacgcgctgacgcagagcacctttgatttctgcttcagtcagttcttcaccacccaggtatttttccatcagctcttcagaagcttcagctgcggattcgatcaggttctggtgccattcgttagccagttcaaccatgtctgccgggatatcttcgtattcgaaggttacgccctggtcagcgtcgttccagttgatagctttcattttcaccaggtcaacaacaccggtgaaatgttcttcagcaccaatcgccagctgcagcggaaccgggttcgcgcccagacgggttttgatctggttaacaactttcaggaagttcgcacccatgcggtccattttgttaacgaacgcaatgcgcggaactttatatttgtttgcctgacgccatacggtttcagactgcggctgaacaccaccaactgcgcagtaaaccattaccgcaccatcgagaacacgcatggaacgttctacttcgattgtgaagtcaacgtgccccggggtgtcgatgatgttgatgcgatgcggctcatactgcttagccataccagaccagaatgcagtagtcgcagcggaagtgatggtaataccacgttcctgctcctgctccatccagtccatggttgcagcgccgtcatgaacttcaccgattttatggtttacaccggtgtagaacagaatacgttcggtagtagtggttttaccggcgtcgatgtgcgcactgataccgatgttacggtagcgtgcgatgggtgttgtacgagccatttgtttcctcgtttatcttttaggcgttcaatttaagtagcccaaagcgggctgcttactggaagcgcccgcctggtgactaaaactccgaagggataaccaacggtagtgtgcgaacgccttgttggcttcggccatacggtgaacgtcttcacgtttcttaactgcagtacctttgttttctgcagcatcagaaagttcgttcgccaggcgcagagccatggatttatcaccgcgtttacgagcagcttcaacgatccaacgcattgccagagcattacgacgaaccggacggacttcaactggtacctgataagtagaaccaccaacgcggcgagacttaacttctacagtcgggcgcacgttttcgagagctacttcgaatgcttccagttcagatttaccagagcgctgagccagggtctccagcgcgctgtatacgatagattcagcagtagattttttaccatctaccatcaggatatttacaaatttagccagcagttcacttccgaacttcggatccggcagaattttacgctgaccaatgacgcgacgacgtggcatggaaatactccgttgttaattcaggattgtccaaaactctacgagtttagtttgacatttaagttaaaacgtttggccttacttaacggagaaccattaagccttaggacgcttcacgccatacttggaacgagcctgcttacggtctttaacgccggagcagtcaagcgcaccacgtacggtgtggtaacgaacacccgggaggtctttaacacgaccgccacggatcaggatcacggagtgctcctgcaggttgtgaccttcaccaccgatgtaggaagtcacttcgaaaccgttagtcagacgaacacggcatactttacgcagcgcggagttcggtttacgaggagtggtagtatatacacgagtacatacgccacgtttttgcgggcatgcttccagcgcaggcacgttgcttttcgcaactttgcgagcacgtggtttgcgtaccagctggttaactgttgccattaaatagctcctggttttagcttttgcttcgtaaacacgtaataaaacgtcctcacacaatatgaggacgccgaattttagggcgatgccgaaaaggtgtcaagaaatatacaacgatcccgccatcaccaggccatctggctggggtgcttaaccgtaagtctgacgaaatcagtatagtcaatgagaatgatgtcgttgctaatttgaccagtcaaaccgcgggcaataaggtcttcgttcagggcatagaccttaatgggggcattacgcagactttcaaggtagcggttaccgtcaactgcggcagttacgccatcttgcaataatagcagttcgtctccttcactgagcagacgcagcagcgcagcaaaatccgtcagccagggactgcgatgtaatgtgtgcagcataaacgcctcaaaacctcaaaataacatcgtagttggcgagttcgcggcgtaaggcatctgcttcgagcggcgtggcttcgacaacaaagggtgtctgcggatctaacccgcgttcgcgcagactagccgcacaaacccagcactgttcaatgtcgtacagacccaacaatttaaaagtggcaatgtaatcacgcgccagcactgcatcgggcttttgtcctggcagcagctgaaaaacgccatcagctataaagaagacagccagatcgtcagttaatgcggaagttgccagtaaagcatctaaaccttcccggcctgcggctgtaccatgaggtgcagtagaaaaaacaaacgcaattcgtttcatcagaactgtaccaccctgtcacaggtcaggctggcttccgccagcgccccaagtccgcttaaggtaaatccctgctgaaggttactgctagccagccccagtcttccggcctccgtttcatcaacaacgccacggcgtaatgctgccgctacgcagatattcagcgccacaccatgttgcgcattcagttgttgccaggcccgtacgaggtcaaattcgtcacttgccggagaggtcaattggttagcgttatagaccccttcccgatagaaaaagacgctgcttaactcatggccatctgctatcagcgcctgcgcaaactgaaaagcactactcgcctgttgcgtaccgtatgctggcccggtcaccacgatggcaaaacgcattacttatcttgcccctggaaatcaccgctcttgaactggcggatgtagagatagacagtgtgtttggagatgttcaggcggtcagcaacctggttgatcgcatctttaatatcgaagatccctttctcgtagagattcagcacgatctgacgatttttggcgttattagaaacattgcgatcggcattcacttcttcgatggtgaactccagcgtttgggtaaccagatcttcaacagaagaggcaaagttgacgctactaccgacatccggggtttctggcggcacaaaggtgctcataatctggctgaagggaacatcaagattcatattgatgcacagcagaccaattacacgctgttcgcggttacgaatcgcgatagtcagggacttcattaatacgccgcttttggcgcgagtaaagtagcatttagaaacgctgctatccgctcccgtcatatcgtgcagcatacgtagcgccaggtcagtaattgggctaccaatcttccggcctgtatgttcaccgttagcaatgcgaatggcactacattttagatcctgcaaagagtgcaaaacgatttcacagtgggagccaataagcatcgctaacccgtccaccaccgcttcgtaggatttcagaatatcaaaatcggtctggtcgaaaggacgttgatccagtaaatccaactcactggtttcgttggttaaaaggctcctggacatgaaaaaaaacactccttttcaggagcctgtcgttaacttttcagggcaggctcattaatgatgcgggtaactaaattaatacagcggaggttccgctttccagcactaattatatccggcctgtaataaaaaaaccgccgcctggtcaggcggcggttcttaatgcttattttttagcagaatctgcggctttcgcatcagcttccggctttgcatcagccttcggcgctggtttcacatccagcagctctacgtcaaacaccagggtagaattcggtgggatccccggaacacccgctttgccgtaagccagttctggtggaataaccagtttgatcttaccgcctttcttgatgttcttcagaccttctgtccaacccgggataacaccgtccagacggaaagaaagcggttcaccacgggtgtaagagttgtcgaactctttaccgtcgatcagcgtacctttgtagttcactacaacagtatcgctgtctttcggtgcttcgcctttaccggcttctactacctgataaaccagaccagtactagaggttttcacacctttctctttggcaaatttctcgcggtactctttaccttttgcttcgttatcagccgcgtctttttccatcttcgcctgagcagaagacttcacgcgagcttcgaatgcttgtagagtctgttcgatctcttggtcggagagtttgcttttatcagcaaatgcatcctgaacaccagcgatcagctgatctttatccagtttgatgcccagtttttcttgttcttttagagagttttccatgtaacgacccaggctggcacccagtgcataagcacttttctgatcgtcatttttgaacgctgctttgctgtcagcagctgtagcaggttttgcagcttcagcagcaaaagtgattggtgcatgcagggcaacggccattgtggtcgccagcagcgttactttaaacagacttttcatccatatctccaggatcggggcatctcaccccagggttaactattatcagaagggtactataaagcgttgtcgaacaaatctacatacagacacgccctattatcatctattttcagactctttttgtttaaattagtttcgatgaccgcgaaatgagtgctgtctcgggcagcaaagttaagtagaatccgcggcgaccattcgacaaaagaggtgaatcatgcaggatttaagtttggaagcacgcctggcagagctggagagccgactggcttttcaggaaatcaccattgaagaactgaacgtcacggtgaccgctcatgaaatggagatggcgaaactgcgcgatcatctgcgtctgctgaccgagaagttaaaagccagccagccgagcaacatcgcgagccaggctgaagaaacgccaccgccacattattgaggcgtaaaaaaagcggggattccccgcttttttgtcactttttcggtattagtggcaaccgcaaccgccgttgcctttaccgccacagcagccttcgccaccgtgttcatgaccgtgatcgtggccatgaccgccgcagcaaccgtcgtggtcgtgatcgtggtggtgatcgtgcgcgccgtgaacgtgaccatgagccagttcttcttcagtcgcttcgcgaatcgccacaacttcaacgttgaatttcaggttctgaccggccagcatgtggttaccatcaaccacgacgtgatcgtcttcaaccgcagtgatttcaaccggtaccggaccctggtcggtttcagccaggaaacgcatacctacctgcagttcatcaacgcccataaatacgtctttaggaacacgttgcaccaggttttcgtcgtactgaccgtaagcgtcgttcgcgccaacagcgacatcaaatttgtcgccaacttcatgaccttccagcgccgtttccaggccagagatcagggaaccgtgaccatgcaggtagtccagcggcgcactcaccggagactcatcaaccaacacaccgtcttctgtacgtacctgataggccaggctgaccaccaggtcttttgctactttcatgatatctcctgagcatgggaagaatagtggcgcagattgtagcggaattctgcagccgtgtactcactagcttaaaaaaactcggcgcatatcgttagtccggatgaaaaatcccgatcacttgctcatctttgcgaacgtgatcgcgggcttctttgtctgcttctcgcatctgatgtccgcacttaacacattcaacaatatcaatattattttcgcgccacatcgccatactatcctgcgcctgacaggccgggcattttgcgcccgcaataaaacgttttcggattgccatctttaccctttactcaaattcatcccagccgtccagctggcgtcgttcttgttgcatttcacgctggaaaatctcttccagttcgcgtcgggcttccctggcgcgagaaatttgtacggtatcggcatgcattgggatgagctctcgcagcatccgcatatccaggcggcgaaaatgcagttgcgctcgctgtgcctgatgcggatgcatgccaagcgtgaccagcgtcttgcgccccagctctaacgcactggagaatgtttcacgggaaaactgcgtcacccctgcctgtaataactcatgcgcttccacacgtccgcgcgctcgcgcaagaatatgcaaatgcggaaagtgctgttggcatatttccaccagcttcatggtgtcttccggctcgttacaggtaatgacgatagactcagcggcctctgcacccgcagaacgtaaaagatcgacctgcgtggcgtcgccgtaataaactttgtagccgtatttacgcatcaggttaacggcgctgatatcccgctccagcacggtaatgcgcattttatttgccatcagcaaacgaccaatcacctgaccaaaacgcccgaagcccacgacaatgacctggggtttatcatcgttgacccacggtttttcgtcttcttcttccggtccgttaaactggcgggatagccatttatccaccagcttcatcagcaacggcgtggtcatcatggaaagcgtcaccgtcaccagcaacaacgccatctggtcgccctggaataagcgttgactagaagcggtagaaaagaggacaaaggcaaactcaccaccctgactcaacacgccagcaaactgcatccgctcactgctacgcacgccatacaatcgcgccagcagatacagcacgagaattttcaccgccaccagcacaaccacgcttatcactacccacaacagatgggtataaagcaccccgaggttgagactcatgccgacagagataaagaacaaaccgagcagcaagcctttgaagggatcgatagccgtttccagttcatggcgatattcactttccgccagcagcacgcccgcaataaatgtaccgagcgccatgctcagccccagcgcatccataaacaatgcggaacccaacaccagcagcagcgtcgcggcggtgaacacttcccgcacgccagaagctgcaataaagcggaataccggacgcagtaaatagcgcccaccaatcagcatgccgacaaacgccagcaccttcatgccgaccttcatccagtcgaaatgttcgtctgcgctccccgccaacaacggcactaacgccagtgctgggattactgccagatcctgaaacagcagaacgctaaacccgagctggccggattcgctgcgattcatccctttctcacgcatcaattgcaacgccattgcagtactagacatcgcaaggccaatgccaccgaccaccgccgcctgccaggcgaaatccgtcagcatcaataatcccgccagcaacgccgcgcttaacagcacctgtgccgcgcctacgccaaaaatgctacgccgcagttgccaaagtttggagggattcaactcaaggccgatgataaacatcaggaataccacgccgagttcgctaaagtggaggatctcatcgacgtcgctaataaaccccagcccccacgggccaattgcaatccctgccagcaaatatcccaacacagcgccaatacccagccggcttgccagcggcaccgcagccaccgccgcgaagagaaacagcactcctgcgagtaaaaaatcggaaccttccatcagcggcctcctggagacagcggatttgccagccagtcaccgtaggctctggcgtggctcgccagctcctgtgcgctttgccgtctcgcccagtaaataatgatgggacttaaccaatgcatccggcacatgcccgccgccagttcaaaggggcgcagcacatcgctcatcgggtagcgattcagcgcgtcataacggtaagcactttccggctcgccggtggtaatcacgctacgccagtactttcccgccagttggtttcctcccggcccgctggcaaaaccacgacttaatacccggtccagccactctttcagtagcgccgggcagctataggtataaagaggatgctgaaagacaatcacctcgtgctcgcgcagtaatgcctgctcacgggggatatcaataaaaaaatcgggatagtgcgcgtaaaggtcgtgcacggtaacattgctgagctgcgtggccggtttaagcagtacccggtttgccacgctgtcctgagattccggatgggcatacagcagcaaaactttcgctggctgagacatcatccccctcccggtatggtttttgtgtatagtcgctgttttgggctaccattgcgcccggtgcggcagctcgcccatacattacattatcataatgataagttaacatagtctgaacatacggcaccttatgattgttttctccagcttacaaattcgtcgcggcgtgcgcgtcctgctggataatgccaccgccaccatcaaccctgggcagaaagtcggcctggtgggtaaaaacggctgtggtaaatctaccctgctggcattgctgaaaaatgaaatcagcgccgacggcggcagctacacctttccgggaagctggcaactggcgtgggtgaatcaggaaacgccggcgttaccgcaagcggcgctggaatatgtcattgacggcgaccgtgaatatcgtcaactagaagcgcagctacacgacgccaacgaacgtaacgacgggcacgccattgcgaccattcatggcaagctggatgctattgacgcatggagtattcgctcccgtgctgccagcctgctgcacggcctcggtttcagcaatgaacaactggagcgcccggtaagtgatttttccgggggctggcgtatgcgtcttaaccttgcccaggcgctgatttgccgtagtgacttgctgctgctcgacgaaccgactaaccacctcgatctcgatgccgttatctggctggaaaaatggctgaagagctatcagggcacgctgatcctgatctctcacgaccgcgacttcctcgatccgatcgtcgataaaattattcatatcgaacaacaaagcatgttcgagtacaccggcaactacagtagctttgaagtacagcgcgccacccgtctggcgcagcaacaagcgatgtacgaaagccagcaggaacgcgtagcgcatctgcaaagttatatcgaccgtttccgtgccaaagccaccaaagcgaagcaggcccagagccgcattaagatgctcgagcgtatggagctaattgcccccgcgcacgtcgacaacccgttccgctttagcttccgcgcgccggaaagcctgccaaatccgttactgaagatggaaaaagtcagcgcgggctatggcgatcgcattattctcgacagcattaaactgaacctggtgcccggcagccgtattggtctgttaggccgcaatggcgcgggtaaaagcacattaatcaaactgttagccggtgaacttgcgccagtcagcggtgaaattggtctggcgaaagggatcaaactcggctacttcgcccagcatcaacttgaatacctgcgcgccgacgaaagtcctattcaacatctggcacgtttagcgccgcaggagctggaacaaaaactgcgtgactacctcggcggctttggtttccagggcgataaagtaaccgaagaaacgcgccgcttctccggtggggaaaaagcccgcctggtgctggcattaattgtctggcagcggccgaatctgctgctgctcgacgaaccgactaaccaccttgacctcgacatgcgtcaggcactcaccgaagcattaatcgagtttgaaggcgcgctggttgtcgttagccacgaccgtcatttgctgcgttccaccactgacgatctctacctggttcacgatcgtaaagtcgaaccgttcgacggcgatctggaagattatcaacagtggttgagcgacgtacaaaagcaggaaaaccagaccgacgaagcgccaaaagagaatgcgaacagcgcccaggcacgtaaagatcagaagcgtcgggaagctgagctgcgtgcgcaaacccagccactgcgtaaagagattgcccgtctggaaaaagagatggagaagctgaacgcgcaactggcgcaggcggaagagaaactcggcgacagcgaactgtatgaccagagccgtaaagcggagttgaccgcctgcctgcaacagcaagccagcgccaaatccggcctggaagagtgcgaaatggcatggctggaagcccaggagcagcttgagcagatgctgctggaaggccaaagcaactgatggcgcagataacgacgaccgatgccaatgaattcagcagcagtgctgaattcatccccatgcgcggctttagcaattgtcatctgcaaaccatgctgccgcgtctgtttcgtcgtcaggtgaaattcaccccgtactggcagcggctggagttgcccgacggcgattttgtcgatcttgcgtggagtgaaaaccctgcacaggcgcaacataaacctcgtctggtggtgtttcacgggctggaaggcagtctcaacagcccttacgcccacggtctggttgaggcggcgcaaaagcgcggctggctgggcgtggtgatgcattttcgcggatgcagcggtgaaccaaaccgtatgcaccgcatttaccatagcggcgaaaccgaagacgccagttggtttttacgctggctgcaacgcgaatttggtcatgcgccaacggctgccgtcggctatagcctcggcggtaatatgctggcctgtttgctggcaaaggaaggcaatgatctcccggttgatgcggcggtgattgtctctgcgccgtttatgctggaagcctgtagctatcatatggaaaagggcttttcccgcgtttatcagcgttacttgctgaacctgttaaaagccaatgccgcgcgcaagctggcagcctaccccggaacgctgccgattaatctcgcgcagttaaaaagcgtacgtcgcatccgtgaatttgacgatctcatcaccgccagaattcacggctacgccgacgctatcgactattatcgtcagtgtagcgccatgccgatgctgaaccggatcgccaaaccgacgctgattattcacgccaaagacgatccgtttatggatcatcaggtgatcccgaaaccggaaagtctccccccgcaggtggagtatcaactgactgaacatggcggtcatgttggctttattggcggtacattacttcatccgcaaatgtggctggagagtcgcattcctgactggttaacaacgtatctggaggcgaaaagttgttgatattaacgtatctggaggcgaaatcatgttgattccgtggcaagacctctcccccgaaacgctggaaaatttaattgaaagctttgtgttacgtgaaggcaccgattatggtgaacatgagcgtacacttgaacagaaagtcgccgacgtcaaacgccagctacagtgcggagaagcggtgctggtatggagcgagctgcacgaaacggtcaatattatgccgcgcagtcagtttcgcgaataacctgcaaccgtcggcggacgagataataatgatagctaagtcatggagttactatgtctgccaaacatccggtcattgcggtaacaggatccagcggcgcggggaccaccaccaccagcctcgcgtttcgtaaaatattcgcgcagttaaatctgcatgcagctgaggtggaaggcgacagttttcaccgttacacccgcccggaaatggacatggcgatccgcaaagcgcgcgacgccgggcggcatatcagctacttcggccccgaggctaacgacttcggcctgctggaacaaaccttcattgaatacggtcagagcggcaaagggaaatctcgcaaatatctgcatacctacgacgaagccgtaccgtggaatcaggtaccggggacattcaccccctggcaacctttaccggaacccactgatgtactgttttatgaaggtttacacggcggcgtagtcacgccacagcataacgttgcgcagcatgtggacttactggtcggcgtggtgcctatcgttaaccttgagtggattcaaaaactgatccgcgacaccagcgagcgcgggcacagtcgagaagcagtgatggacagtgtagtgcgtagtatggaagactatatcaactacatcacaccgcagttttcccgcacccatcttaacttccagcgcgttcccaccgtcgacactagtaacccgttcgcggcaaaaggtatcccgagcctcgatgaaagctttgtggtgatccattttcgtaatctggaagggatcgatttcccctggctgctggcgatgttgcaaggcagtttcatttcccacatcaatacgttagtggtaccgggcggcaaaatgggtctggcaatggaattaattatgctgccgctggtgcaacgattgatggaaggaaagaaaatcgagtaactctgctattacgccggataaaatactatccggcttcacaacgggatagttaagtcacgcggcaaccacttcatagctgtgagtaatattcaccgctttttccagcatcaacgccacactacaatatttctcggcagagagatcaaccgcacgcgcaaccgctgcgtctttcaggtcgcgaccggtgacgataaaatgcagattaatgtgcgtaaacaggcgtggtgcctcttcgcggcgttcagaggtcaattttacttcacaatcgaccacatcctgacgccctttttgcaggatgctaaccacatcgatggcactgcaaccacccgccgccatcaacaccatttccatcggacttggtgctttatcgccactgttgccgtccattaaaatctgatgaccagaggcggattcgcccagaaaagttaacccttcgacccacttcactcgcgcttgcatttttgctactccactgcgtcaattttcctgacagagtacgcgtactaaccaaatcgcgcaacggaaggcgacctgggtcatgctgaagcgagacaccaggagacacaaagcgaaagctatgctaaaacagtcaggatgctacagtaatacattgatgtactgcatgtatgcaaaggacgtcacattaccgtgcagtacagttgatagccccttcccaggtagcgggaagcatatttcggcaatccagagacagcggcgttatctggctctggagaaagcttataacagaggataaccgcgcatggtgcttggcaaaccgcaaacagacccgactctcgaatggttcttgtctcattgccacattcataagtacccatccaagagcacgcttattcaccagggtgaaaaagcggaaacgctgtactacatcgttaaaggctctgtggcagtgctgatcaaagacgaagagggtaaagaaatgatcctctcctatctgaatcagggtgattttattggcgaactgggcctgtttgaagagggccaggaacgtagcgcatgggtacgtgcgaaaaccgcctgtgaagtggctgaaattagctacaaaaaatttcgccaattgattcaggtaaacccggacattctgatgcgtttgtctgcacagatggcgcgtcgtctgcaagtcactagtgagaaagtgggcaacctggcgttcctcgacgtgacgggccgcattgcacagactctgctgaatctggcaaaacaaccagacgctatgactcacccggacggtatgcaaatcaaaattacccgtcaggaaattggtcagattgtcggctgttctcgtgaaaccgtgggacgcattctgaagatgctggaagatcagaacctgatctccgcacacggtaaaaccatcgtcgtttacggcactcgttaatcccgtcggagtggcgcgttacctggtagcgcgccattttgtttcccccgatgtggcgcagactgatttatcaccccgatatcaactatgcacttcgacaaacgctggtgctatgtttgcccgtggccgttgggttaatgcttggcgaattacgattcggtctgctcttctccctcgttcctgcctgttgcaatattgcgggccttgatacgcctcataaacgttttttcaaacgcttaatcattggtgcgagcctgtttgccacctgtagcttgctgacacagctactactggcaaaagatgttcccctgccctttttgctgaccggattaacgctggtacttggcgtcactgctgagctggggccattgcacgcaaaattgcttcctgcaagcctgctcgccgccatttttaccctcagtttggcgggatacatgccggtctgggaaccgttgctcatctatgcgttgggcactctctggtacggattgtttaactggttttggttctggatctggcgcgaacaaccgctgcgcgagagtctaagtctgctgtaccgtgaactggcagattattgtgaagccaaatacagcctgcttacccagcacaccgaccctgaaaaagcgctgccgccgctgctggtgcgccagcaaaaagcggtcgatctaattacccagtgctatcagcaaatgcatatgctttccgcgcaaaataatactgactacaagcggatgctgcgtattttccaggaggcgctggatttacaggaacatattagcgtcagtttgcatcagccggaagaggtgcaaaagctggtcgagcgtagccatgcggaagaagttatccgctggaatgcgcaaaccgtcgccgctcgcctgcgcgtgctggctgatgacattctttaccatcgcctgccaacgcgttttacgatggaaaagcaaattggcgcactggaaaaaatcgcccgccagcatccggataatccggttgggcaattctgctactggcatttcagccgcatcgcccgcgtgctgcgcacccaaaaaccgctctatgcccgtgacttactggccgataaacagcggcgaatgccattacttccggcgctgaaaagttatctgagtctaaagtctccggcgctacgcaatgccggacgactcagtgtgatgttaagcgttgccagcctgatgggcaccgcgctgcatctgccgaagagctactggatcctgatgacggtattgctggtgacacaaaatggctatggcgcaacccgtctgaggattgtgaatcgctccgtgggaaccgtggtcgggttaatcattgcgggcgtggcgctgcactttaaaattcccgaaggttacaccctgacgttgatgctgattaccaccctcgccagctacctgatattgcgcaaaaactacggctgggcgacggtcggttttactattaccgcagtgtataccctgcaactattgtggttgaacggcgagcaatacatccttccgcgtcttatcgataccattattggttgtttaattgctttcggcggtactgtctggctgtggccgcagtggcagagcgggttattgcgtaaaaacgcccatgatgctttagaagcctatcaggaagcgattcgcttgattcttagcgaggatccgcaacctacgccactggcctggcagcgaatgcgggtaaatcaggcacataacactctgtataacagtttgaatcaggcgatgcaggaaccggcgtttaacagccattatctggcagatatgaaactgtgggtaacgcacagccagtttattgttgagcatattaatgccatgaccacgctggcgcgggaacaccgggcattgccacctgaactggcacaagagtatttacagtcttgtgaaatcgccattcagcgttgtcagcagcgactggagtatgacgaaccgggtagttctggcgatgccaatatcatggatgcgccggagatgcagccgcacgaaggcgcggcaggtacgctggagcagcatttacagcgggttattggtcatctgaacaccatgcacaccattagcagcatggcatggcgtcagcgaccgcatcacgggatttggctgagtcgcaagttgcgggatagcaaggcgtaatgcaggctaaaccatcggataaggcattcacgccgcatccgacatcttttgcctgatgcttcgtatttacgccccaaccaccttcgccaccgcgtgggcgaaacgttgcatcccttcatcgatatccgcatcttccaccaccaggctcggtgcaaaacgcatcacatccggtccggcattcagcaccattacgccagcctctgcgcccgcatacaggaaatcacgcgcccgacctttgtactgtggtttcagctctgcgccaatcaacagccccataccgcgaatatcgctaaatacatcgtactgctgatcgatcttctgcagatggtcaacaaaacgctggcgtttcgcctgaatgccttccagcacttcaggggtattgatgatatcaaacgccgcccccgctactgcacaggccagaggattaccgccgtaggtggaaccgtgagaaccaggatgaaacgcagaagcaatttccgccgtggtcagcatggcgctaatcgggaagccgccgcctaacgctttcgcagaggtcagaatatccggcgtaacgccgtagtgcatgtaagcaaacaaatcgccggtccgccccatcccgcactgcacttcatcaaacaccaataatgcctgatgttgatcgcacagctcgcgcaagccctgcaaaaactctggcgtcgctgccgtcacaccgccctcgccctggatcggctcaaccaccaccgcacaggtgtgatcatccatcaccgctttcactgcatggagatcgttaaagggaacgtggatgatgtctgccggtttcggcccaaagccgtcggaatattttggctgcccacccacgctaacggtaaacaggctgcgaccatgaaaagcgttatggaaggcaataattttggttttgaacgggctatgacgcacacaggcgtaatggcgtgccagtttaaaggcggtttcgttagcttccgtgccggagttcataaacaccacgcgttcggcaaacgttgcctcaatcagtttacgcccaagacgcagcgccggttcattggtgaaaacgttactgatatgccacagagtttcgccctgggtttttaacgcgttcaccagcgcaggatggcaatggcccaacgccgtaactgcaatgccacccgcgaaatcgacatactccttgccttgctgatcccagattcggctgccctgaccttttaccggaataaactctgccggagcataaatcggcaggatcacttcatcgaaagtcgcgcgtgtaattgctgtttgttcaattgccatctcatgatcaccctgttacgcataaacaaatgtgaaattataaccacaaaatatgcataaaaaatcactaaatggcaatcagaaatcagcgatgcaggaaattagccagcagttgatgtccttgttcgctaagaatactttctggatggaactgcacaccttccagatcccactggcgatggcgaatccccataatctctcgggtttcgctccaggccgtcacgtcaaagcacgctggtaaactgtcaggttccaccaccaggctatggtagcgtgtcacggtaagtggatttgccagcccccgaaatacgccctcaccgttatgtgtaatcgggctggttttgccgtgcatgacctttgcggcgcgcacaactttaccgccaaatgcctgcgccattgcctgatgaccgaggcagacgccaagaatcggcaagcgcccggcatagtggcgaataacgtcaagggagatcccggcttcatctggcgtacaggggccaggactgatgacaattttttgtggtttaagggcgtcgatatccgccagcgtcaacgcatcgttgcgcttaaccagcacatccgcccccagttcacaaaagtactggtagaggttccaggtaaaagaatcgtagttatctataagcaggatcatggcggctccggtacaaaagaaccgcgctattttactcagattccccggcttcgcttaccactttgctaaatatcatctgcagtgcggtgagatcccccattgccccactctgatttgcctgattccaggcctctttttcgataccctgccagctcagttgatatccggcatgaatcgccagttgctcgaagaagatccgctgtgccagaccacttcccacccggaagggatgcagcacgttgatttcacaatagtaatgcgccagccgctcgacgaacttcgctttctccaggccaaccagataaccttcttcctccagatcctgcatcagggcattgccctctttttcgatataagcaaagtggcagaacggcgtatcaccctgataaatatcaacttcacgcagttgccctgcccagtcgaaaatatcctgatacagctggcgatggatagttcgcaaatgcggtaaaccgcgcaccagcggaccaagctcaatggtcgcagcacgcagcgccgtcatttcgtaagcggcctgttccagccgctgctgctggcggatgttcagccggttacgcatgatatcaaggcctggataaagatacggatcgcgcccttcgccgaatttatcgctcatagtgactcctcagctcttcaaggcgcgctaaagcctctgcggcagtaagagtgactaaaggcatctcgacgccttcaagacggcgactggcctgaaaattacgattacgctgaagctcccagagacgggacttttgcttatcggtgagtttcttcacttgatgcctccctgaacgtgtccatttgccacaagtataagcggcaaatccgggttacgccgggagagcagaagcgcgggcaagattgcccgcgcgagaaatcattacggcaggactttagcggaaaggataactaccggtttactcggcacattctggtacggaccaacgtcatgagtcggcacctgggaaatcttatcggcaacgtccatgcctttcaccactttaccaaataccgcgtaaccgaaatcacgctgaccatggtcaaggaaggcgttatcggcaacgttgataaagaactggctggtggcgctgtctttgtcagcggtacgtgccatcgcgatggtgccacgcgtgttgcgcaggccgttatcggcttcatttttgattggcgggtttggttttttctgctgcatctgctcggtgaaaccgccgccctgaatcataaagccaggaatgacgcggtgaaaggtagtgttgttataaaaaccgctgttcacataatcgacaaagttttgcacagacactggcgctttttgtttatccagctccagttcgatgttaccagcactggttgtcaacaatacgtgcgggtcccctttcgctgccattgctgcgggagaaagagcagaaagagcgaaaacagcagccatcgccgccagggtgcttttgaacatgagatttccttaacaaacagagcagaaaaaaagcaagtgaagagattctaaatagccttcaagaacaaggccatccctttacctaattttacgtatctgaaatatatgtaacctgacgatcactttttattccgtgatcaaaatcacctcttaaaatgcaatttagcaaccgattgcaataaaacatttaaacagatcacaaaatcacctaaaatcgcccgctcgcggcatatcccgctatgccattttatttttgaacgcaggccaatcatgactaacagcaatcgcatcaagctcacatggattagctttctctcctacgcactgactggtgcgttggttattgtcaccgggatggtgatgggaaatatcgccgattatttcaatctgcctgtttccagtatgagtaataccttcaccttcctcaacgccggcattttaatctctatcttcctcaacgcctggctgatggaaatcgtcccgttgaaaacgcagttacgttttggctttctcctgatggtgctggcggttgccggtttgatgttcagccacagcctggcgctgttcagcgcggcgatgttcattctcggggtggtcagcggcatcaccatgagcattggtacattcctggtaacacaaatgtatgaagggcgtcagcgcggttcccgcctgttatttaccgactccttcttcagtatggctgggatgattttcccaatgatcgccgcgtttctactggcgcgcagcattgagtggtactgggtttatgcctgcatcgggctggtgtatgtcgctatttttattctgaccttcggctgtgagttcccggcgctgggcaaacatgcgccaaaaacggatgctccggtagagaaagaaaagtgggggatcggcgtactgtttctctctgttgcggcgttgtgctacatcctcggtcagttaggttttatctcctgggtgcctgagtatgccaaaggcctgggcatgagcctgaacgacgcgggcacgctggtgagtaacttctggatgagttacatggtcggcatgtgggcgttcagctttattcttcgcttctttgatttgcaacgcattctgaccgtactggctggtctggctgcgattctgatgtacgtctttaacaccggaacaccagcacatatggcgtggagtattctcgctctgggcttcttctccagcgcgatctataccaccatcatcaccctgggtagtcagcagaccaaagtaccgagcccaaaactggttaactttgtcctgacctgcggaaccatcggtactatgttgacctttgtggttaccggcccgatcgttgaacatagcggtccgcaggcggcactgcttacagcaaacggtctgtacgctgtcgtctttgtgatgtgcttcctgttaggtttcgtcagccgtcaccgtcagcataacaccctgacctctcattaattgctcatgccggacggcactatcgtcgtccggccttttcctctcttcccccgctacgtgcatctatttctataaacccgctcattttgtctattttttgcacaaacatgaaatatcagacaattccgtgacttaagaaaatttatacaaatcagcaatatacccattaaggagtatataaaggtgaatttgatttacatcaataagcggggttgctgaatcgttaaggtaggcggtaatagaaaagaaatcgaggcaaaaatgagcaaagtcagactcgcaattatcggtaacggtatggtcggccatcgctttatcgaagatcttcttgataaatctgatgcggccaactttgatattaccgttttctgtgaagaaccgcgcatcgcttatgaccgcgtacacctcagctcttacttctctcaccacaccgccgaagagctgagcctggtgcgcgaaggcttctacgagaaacacggcatcaaagttctggtcggcgaacgcgctatcaccatcaaccgtcaggagaaggtgattcactccagcgccggacgtaccgttttttatgacaagctgatcatggcaaccggttcctacccgtggatcccgccaatcaaaggttctgatactcaggactgctttgtctatcgcactattgaagacctcaacgccattgaatcctgcgcccgtcgcagcaaacgcggtgccgttgttggtggcggcctgttaggtctggaagccgcaggcgcgctgaaaaacttaggtattgaaacccacgttatcgaatttgcccctatgctgatggcagaacagcttgatcagatgggcggcgagcagctgcgtcgcaaaatcgaaagtatgggcgtgcgcgttcacaccagcaaaaacacccttgagattgtgcaggaaggtgttgaagcgcgtaaaaccatgcgttttgccgacggcagcgaactggaagtcgactttatcgtcttctctaccggtatccgtccgcgcgataagctggcaacccagtgtggtctggacgttgctccgcgtgggggtattgtcattaatgattcctgccagacttccgatccggatatctacgccatcggtgaatgcgcaagctggaacaaccgtgtatttggtctggtagcacctggctacaaaatggcgcaggtcgccgttgaccatattctcggtagcgaaaacgcctttgaaggtgctgaccttagcgccaagctgaaactgctgggcgtagacgtaggcggtattggtgatgcgcacggtcgcacgcctggcgcacgtagctacgtttacctcgacgaaagtaaagagatctacaaacgcctgattgtcagcgaagacaacaaaaccctgctcggtgcggtactggtgggcgataccagcgactacggtaacctgctgcaactggtgctgaacgctatcgaactgccggaaaacccggattccctgatcctgccagcacacagcggtagcggcaagccgtctatcggtgttgataaactgccggacagcgcgcaaatctgctcctgcttcgacgtcaccaaaggtgatctgattgctgccatcaacaaaggctgccacacagttgcggcgctgaaagctgaaaccaaagcgggtactggctgcggtggctgtatcccgctggtcactcaggtactgaacgcggaactggcgaaacagggcatcgaagttaacaacaacctgtgcgaacactttgcttatagccgtcaggaactgttccatttgatccgcgttgaaggcattaaaaccttcgaagaactgctggcgaaacacggcaaaggctacggttgtgaagtttgtaaaccaaccgtcggtagcctgctggcctcctgctggaacgaatacattctgaagccggaacatactccgctgcaggattctaacgacaacttcctcgctaacatccagaaagacggcacctacagcgtgatcccgcgttctccgggcggtgaaatcaccccggaagggctgatggcggtaggtcgtatcgcgcgtgaatttaatctctacaccaagatcactggctcccagcgtctggcgatgtttggcgcacagaaagacgatctgccggagatctggcgtcagctgattgaagccggcttcgaaaccggtcatgcctatgcgaaagcactgcgtatggcgaaaacctgcgtgggtagcacctggtgccgctacggcgttggcgacagcgtcggcctcggcgtggaactggaaaaccgctacaaaggcatccgtacgccgcacaaaatgaagttcggtgtctccggctgtacccgtgaatgtagtgaagctcagggtaaagacgtgggtattatcgccactgaaaaaggctggaacctgtatgtttgcggtaacggcggcatgaaaccgcgtcatgcggatctgctggcggcggatatcgatcgcgaaacgctgatcaaatatctcgaccgcttcatgatgttctacatccgtactgccgacaaactgacgcgtaccgcaccgtggttagaaaacctcgaaggcggcatcgattacctgaaagcagtgatcattgacgacaaactggggctgaacgcacatctggaagaagagatggcgcgcctgcgtgaagcggtactgtgtgagtggactgaaacggtcaatacgccgtctgcgcagactcgcttcaaacacttcatcaacagcgacaagcgtgacccgaacgtgcagatggtgccagagcgcgaacagcaccgtccggcaacgccgtatgaacgtatcccagtaactctggtggaggacaacgcatgagccagtggaaagacatctgcaaaatcgatgacatcctgcctgaaaccggcgtctgcgcgctgttaggtgacgagcaggtcgcgattttccgcccgtatcacagcgatcaggtgtttgcgatcagcaacatcgacccgttcttcgagtccagcgtgctgagtcgcggactgattgcggaacaccagggcgagctgtgggtcgccagcccgctgaaaaaacagcgttttcgcttaagcgacggcttgtgcatggaagacgaacagttttccgtcaaacattacgaagcgcgagtgaaagacggcgtggtgcagctgcgcggttaatgttttaacgggaggcgcaatgcctcccctttttgcatggtcctgtaataatcttcggtatattgcaggacattttttaaactttttgttttattttttgtttttattttttaaaggataatcaaatgtttacagacactattaataagtgtgcggctaacgctgcgcgcattgcacgcctgagcgcaaataacccgctcggcttttgggtcagctccgccatggcgggcgcgtatgtgggtcttgggatcatcctgattttcacgctcggtaatttgctcgatccatccgtacgccctttggtgatgggcgcgacctttggtatcgccttaacgctggtgattatcgccggttctgaactgttcaccggacacaccatgttcctcacctttggggtaaaagcgggcagcatcagccacgggcaaatgtgggcaatcctgccgcaaacctggctgggtaacctggtcggttccgtcttcgttgccatgctctatagctggggcggcggtagcctgctgccggtagataccagcatcgttcactccgtcgcgctggctaaaaccactgcaccggcaatggtactcttcttcaaaggtgcattgtgtaactggctggtttgcctggcaatctggatggcgctgcgcactgaaggggcggcgaaatttatcgctatctggtggtgtctgctggcatttatcgcgtccggctacgagcactctatcgctaacatgacgctgttcgcgctctcctggttcggcaaccacagcgaagcctacacgctggcgggtattggtcataacctgctgtgggtgacgctgggtaatactttaagtggtgccgtattcatgggattgggttattggtatgctacgccgaaagcgaatcgtccggttgcggacaaatttaatcaaactgaaacggctgccggttaattactaaggggtttttacgtggatcatttgcctatattttgccaattacgcgatcgcgactgtctgattgtcggcggtggtgatgtcgcggaacgcaaagcaaggttgctgttagacgcaggcgctcgcttaacggtgaatgcattagcgtttattccacagttcaccgcatgggcagatgcaggcatgttaaccctcgtcgaagggccatttgatgaaagccttctcgacacctgctggctggcgattgcagcgacggatgatgacgcgcttaaccagcgcgtcagcgaagccgctgaagctcgtcgcatcttctgtaacgtggtcgatgcgccgaaagccgccagctttattatgccgagcattattgaccgcagtccgctcatggtagcggtctcctctggcggcacctctccggttctggcacgcctgttgcgcgaaaaacttgaaagtctgctgccgttacatctgggccaggtagcgaaatacgccgggcaattacgcgggcgagtgaaacaacagttcgccacgatgggtgagcgtcgccgtttctgggagaaattgttcgttaacgaccgcctggcgcagagcctggcaaacaacgatcagaaagccattactgaaacgaccgaacagttaatcaacgaaccgctcgaccatcgcggtgaagtggtgctggttggtgcaggtccgggcgatgccgggctgctgacactgaaaggactgcaacaaattcagcaggcagatgtggtggtctacgaccgtctggtttctgacgatattatgaatctggtacgccgcgatgcggaccgtgttttcgtcggcaaacgcgcgggataccactgcgtaccccaggaagagattaaccagatcctgctgcgggaagcgcaaaaaggcaaacgcgtggtgcggctgaaaggtggcgatccgtttatttttggccgtggtggcgaagagctggaaacactgtgcaacgcgggtattccgttcagcgtggttccgggtattaccgcagcttctggttgctctgcctatagcggtattccactcacgcatcgcgattatgcccagagcgtacgcttaattaccggacacttaaaaaccggtggcgagctggactgggaaaacctggcggcagaaaaacagacgctggtgttctatatggggttgaatcaggccgcgactattcagcaaaagctgattgaacacggaatgccaggcgaaatgccggtggcaattgtcgaaaacggtacggcagtcacgcagcgcgtgattgacggtacgctcacacagctgggagaactggcgcagcaaatgaacagtccaagcctaattattattggtcgggttgttggcctgcgcgataaactgaactggttctccaaccattaatttaacccgggccagagaattctggccttcttaatgactctttttatatattcagcaaataaaacatagccccttaataaatattatctgctaatgggttatattcaccgttacagcgacttacaaaattaagtcattcgctcactgacgccaattaaatattcctgtatcgttcttaacgagcagtctgcttatattcatataatcaatgaatattaattaatatataatacatagggaatgtaaatgaacaaatttattaaagttgcactggtaggtgcagtactggctacgttaactgcatgtactggtcatattgaaaaccgtgataagaactgctcttacgactacctgctgcacccggcaatttctatttctaaaatcattggcggttgcggtcctactgcacagtaagtctctgacagaaatcggctaacaccggtttaattgcccgacgccctctggattttccgagggcgtatttgtttctatgtccttcttgcccccgcccgtaaaaatattttcactttaaattcaatttgataactacatccattagccacagcgcgatcctgtgcgaaattttgtgatcttcctccacattacataacatcatatgttgttatattcatcatgcattgtcatgttaccttttaaatgactgcaaactctcccctacaacgtattggacaagaaaaaggtatcgctatgggaagccaggaactccaacgcaagctcggattttgggccgttcttgcaatcgccgtcgggacaaccgtcggctccggtatttttgtatctgtgggtgaagtggcaaaagcagcgggcacgccgtggcttacggtgctcgcgtttgtcattggcgggttaattgtgatcccgcaaatgtgcgtctatgcggaactatccaccgcttatccggaaaatggcgcagattatgtttatctgaaaaatgccggaagccgaccgctggctttcctctccggctgggccagcttctgggccaacgatgcgccgagtttgagcattatggcgctggcgattgtcagcaatcttggctttttaacgcctatcgatccgttgctcggtaaatttatcgccgccggattaattatcgcctttatgttgctacacctgcgctccgttgaaggcggcgcagcgtttcagacgctaattaccatcgccaaaattatcccgttcactatcgtcattggccttgggatcttctggtttaaagcggagaattttgccgcccctaccaccactgcgattggcgcaacgggcagctttatggcgctgctggcggggatctctgccaccagttggagctataccggcatggcctctatctgttatatgaccggcgaaattaaaaaccccggaaaaaccatgccacgagcgctgattggttcctgtctgctggttctggtgctctacaccctgctggcgctggtgatttccggcctgatgcccttcgacaaactcgccaattctgaaacgccgatttccgacgccctgacctggatccccgcactcggcagcaccgctgggatctttgttgccatcacggcgatgatcgtcattcttggtagcctttccagctgcgtgatgtaccagccgcggctggaatacgcgatggcgaaagacaacctgttctttaaatgcttcggccatgtgcatccgaaatacaacacgccggatgtctccatcatcctgcaaggggcgctggggatcttcttcatcttcgtttccgatctcaccagcctgctgggttatttcaccctggtgatgtgtttcaaaaataccctcaccttcggctccatcatctggtgtcgtaaacgcgacgattacaaaccgctgtggcgtactccggctttcgggctgatgaccaccctcgccattgcgagtagcctcattctggtcgccagtacctttgtctgggcaccgattcccggccttatctgcgccgtcatcgttattgctactggtctgcctgcttacgccttctgggcgaagcgtagccgccagctcaacgctttgagctaatgttatctggagaaaataaaatgttggatattgataaaagcaccgtggactttctggtcaccgaaaatatggttcaggaagtggaaaaagttctcagccatgacgttccgctggtgcacgccatcgtggaagagatggtgaagcgcgacattgatcgtatttatttcgttgcctgcggaagcccactcaacgcggcgcaaacggcgaaacatctggcggatcgcttttccgatcttcaggtctacgccatttccggctgggagttctgcgataacaccccgtatcgcctcgacgatcgttgcgcagtaattggcgtttctgactacggtaaaaccgaagaggtaatcaaagcgctggagctgggccgggcctgcggcgcactcactgcggcgttcaccaaacgcgcggatagcccgattaccagcgcggcggaatttagcattgattatcaggccgactgtatctgggaaattcacctgctgctctgctacagcgtggtgctggagatgatcacccgcctcgcgccgaacgcggaaatcggcaagatcaaaaacgatctcaagcagttgccgaatgcgctcggtcatctggtacgcacctgggaagaaaaaggccgccagcttggtgaactggccagccagtggccgatgatttataccgttgctgcgggtccgctgcgtccgctgggttacaaagaaggcattgtaacgctgatggaatttacctggacgcacggctgcgtgattgagagcggagagttccgccatggcccgctggagattgtcgaaccgggcgttccgttcctgttcctgctcggcaatgatgaaagtcgccacaccaccgaacgcgccattaactttgttaaacagcgtactgacaacgtgatcgtcatcgattacgccgaaattagccaagggctgcacccgtggctggcaccgttcctgatgttcgtgccaatggagtggctctgctactacctgtctatttacaaagatcacaacccggatgaacgccgctattacggtggtctggtggaatattaatccctctcccggcccggcaacgggccggatttacgcaaggagttacccgatgaaaacaggtatgtttacctgcggccaccagcggctgcctattgaacacgcatttcgtgatgcaagcgagctgggttacgacggcatcgaaatttggggcggtcgcccgcacgcgttcgcgccggacttaaaagcgggcggcatcaaacaaatcaaggcgctggcgcagacgtatcagatgccgattatcggctatacgccagaaaccaacggctatccgtataacatgatgctgggcgatgaacatatgcgtcgcgaaagcctcgacatgatcaagctggcgatggatatggcaaaagagatgaacgcgggttatacgctgatttccgcggcccacgcgggctatctcacgccacctaatgttatctggggacggctggcagagaacctaagcgaactgtgtgagtacgcggaaaacatcggcatggatctaatcctcgaaccgttaacgccgtatgaaagcaacgtcgtgtgtaatgctaatgatgtgcttcatgcgctggcgctggtgcctagcccgcgcctgttcagcatggtcgacatttgcgcgccgtatgtccaggcggaaccggtgatgagttatttcgacaaactgggcgataaattacgtcatctgcatattgtcgacagcgacggggccagcgacacgcattacattcctggagaaggcaaaatgccgctgcgggaactgatgcgcgatattattgagcggggctatgagggttactgtacggtggagctggtgacgatgtatatgaacgagcccagactctatgcccgccaggcgctggaacgctttcgcgcgctgctgccggaggatgagagatgaaaaccctggcgacaatcggcgataactgcgtcgatatctacccgcaactgaataaagcgttttctggcggtaatgcggtcaatgtggcggtgtactgcactcgctacggcatacagccgggatgcattacctgggtgggtgacgatgactacggcacaaagctgaagcaggatctcgcccgcatgggcgtcgatatcagccatgtccatacgaaacacggcgttaccgcacaaactcaggtggaactgcacgacaatgatcgcgtttttggcgactacaccgaaggcgtgatggccgactttgccctgagtgaagaggattacgcctggctggcgcagtatgacattgtgcacgcggcaatctggggacatgcggaagacgcattcccacagctgcacgctgcgggcaaacttaccgctttcgacttctccgacaagtgggacagcccgctctggcagacactggtgccgcatctcgattttgcctttgcctccgcaccgcaagaagacgaaacgctgcgtctgaagatgaaagcgattgttgcccgtggcgcaggaacagtgattgtcacgctgggtgaaaacggcagcattgcctgggatggcgcgcagttctggcgtcaggctcctgaaccggtgacggttatcgacaccatgggtgccggagatagcttcattgccggattcctttgcggctggtctgcggggatgacattaccgcaggcgatagcgcagggaacggcgtgcgcggcgaaaaccattcagtaccacggtgcctggtaagtataacgttggcgtgagcatcttcacgccaacgtgctgttacttgccggaaaacgaccctataatccgagtaattcattctttatttcagggtcgattatgagtgctacggaccgctactctcatcaactcctctacgctaccgtccgccagcgactgctggatgatatcgcgcagggggtttaccaggccgggcaacagatccctaccgaaaacgagctttgtacacaatataacgtcagccgcattaccattcgcaaagccatcagcgacttagtggcagacggcgtactgatccgctggcagggaaaaggcacctttgtacaaagccagaaagttgaaaacgccctgcttactgtcagtggttttaccgattttggcgtcagtcaaggcaaggcgacgaaagagaaagtgatcgaacaggaacgggtcagcgccgcgccgttttgcgaaaagctgaacatccccggaaacagcgaagtgttccatctctgccgggtgatgtatctcgataaagagccgctgtttattgatagtagttggatcccgctgagccgttatcctgactttgatgagatttacgtcgaaggaagctccacctatcagttatttcaggagcgttttgacacgcgagtggtcagcgacaaaaagaccatcgatatctttgccgccacccgcccgcaggcaaaatggctgaaatgcgaactgggcgaaccgttgtttcgcatcagcaaaatcgcctttgatcagaatgacaaaccggtgcacgtctccgaactcttctgccgcgccaatcgcatcaccttaactattgataataaaagacattaaccgtaggccggataagatgcgccagcatcgcatccggcgatgctggcgcgttgaattttacatcccgtacgttcccctcaccctaaccctctccccaaaggggcgaggggaccgttcagtacggaatttagcttgacggtgctatccagcattaaatactggcaatactctcacgcaaaatccgcagcaccgtctcttcaccgctgcgattcgggttaatgcgaatcgcacaatgttcactttgtggattcgcctggcgaaacgttccggaaaggcgataaaagagcggcgggatttcatatttgctctctgcacccaccgggtaaggcaaggcaccgcgcttttgcgcctcttccagcactctggcggcaatcggctgatgaaactcgacaatcaacaccttgctctgcgcattagcaatcaccgcgcttttcacttccggcaccgcaccaccgttaagcaaagccagcaaccgttcagatacccctgcctgcaccgcgtgcatcactggcgcaaacaccagaccacgcaatacttccagcgcctgtgcgccctggatctggctaccgccggagtaaagcgtggcgcgaatacggttgataacatcagcatcgccgaccactgcaccaacaccctctggcccaaatagcttgaagcaggaaaatgtgctgacattcgcgccgcattcacagccgattcgagccaccttcatcaccgcatagttgtcatcggttaacgctggaacacctgccgcgcgcaacgttgccagcacatctgccagcacgtagctgtcctgcggctgctggcgcgtatgctgcaccagcgccgcatccggttgttgctcgtcgacgacctgcttcagtgcgctcaggtcattgaaatcaacagtaataagcgtcagccccatctgctcaataataacccgtgtcgtcgggtaaacaggcgcgtcatgcaccagaagacgctgccccggtttgagcaaagccgccagcccggcgcgaatcgcgccagtccccgcgtcctgcaccagcgccgcagcctgtgcgtgaaatgcatcagccagcacctgttccacacgctgggtaacgcgcggttgattcagtcctggcgttaagcctaaatcaccgccagtaagaaactcgctgccggggaaatggcgacaaatgctatccaccagcgcaaactgcttttgctgcgcctcaataatcgtcaggctttgcagaggaaacgtcttcataggtgccttccttaagccggaacgaacaggccaagccagtaaagaacattcagcagaataccggtgatcattactgccacgaccggtgccgccattttctgtaccggacggcccagggattcgttgaggaagtaaatggcaaccgcgatagagaatccggtataacccgccatcttaattgctgcgaaaatgctaccgaccagcagcgccacttccatcagcatattcatggcgttacggatgttatcgctcgcattacgcacgctcgggtagcgtcccagccatttgccgatgctacgaagcagcaagacttccgcgctaataaccactgcgcctaataccgctgcaaccatcggattcgggctgagatagtccaccgcataaacaaaggtaaagcccgcaactgcatacacacccgttgctaacgcggtggtggcaatcaacggcacaaaccccagtccgcgcataaattctgccagagccgcctgattaatcagcgtttggctttgttccggcgttacgcctgcggaatatgctttctccagtgtgaagatgctcacttcactgccagcaaaaatcttcatgctggcaacggcggcaatcaatgctcccacgatggcgatatagggtaagtttttgataatccgactcgtgcgttcttcaaacacgctaagcccgctggcatcaatgtcattttcatcacgatgacgcaggtcgtgagttatcgcgatccccagcagcatcaccatgccaataaagatttcgatggattcagggttaagatgtgggaaatagcgcacgactaccacacgggtcatcagtaccaccacggcggcgatcagactttgcttccagccaaactggtagaaaatcgccaccagcgggaacagtgcaaaagcactaaccaccgggctgcttaattcccccaggctacctaatacatccaccggcagcgcggtcagcagctggtttactggcaacaggcaagtaaggatcaacacgccccagatagcgccaagaccaaacgccatcaggctgtttatcgccaggacgccgaggatatcggtaggaagaaagagtaaccatgcgttgagcagcccggttttcagggtaaaagagatccccacgctggccacaaaaccaatgctcagaccaaaagcgatactccccgcctcgcgacggttcatatagccttcaatcagttgcggcaggatcgggcggatgccgtcatgaaaaacagccgcgctgcgatgcgccagaaggcttgtcatacccgtcaggcacgccaccacgataatctgaatatacagatccatagtcgtgccttttatttcagatggttaatcagcatcggaatcgcgtgttcgacgtgctcaacggaaaggccaaacgccacttttccttcagcgatcattttggcgatatgctcgtctttcgctttaatgcctggtttggcaatggtgcaacttttgttatagcctatcaccgcgatggcaatgctcaatgccgcgcccgcaccggtattacacgcgccgatgtaataatccagttgcccggatttcaccttcattgccgcttccatgtcgttgtgaatgaaaacttcaaaacagccaggagccgtcgcttcaatagtttttttaatctgctcacgctgtaagcctgcaacgccaatctttttcatgagtctgtccttattggaaaaattgagagggattttcacgtaacatcacatccacatcggcctgactgaatccactctggcgcaattgcggaataaaggtggttagtaaatagtcatagccataaccaccgttggcttttaaatgggagcggcgcgtaatatccatgctcagcatgacgcggttcagcaacccacggtcgcgtagcgcatgaagcatcgcaatacgcttttcgtccgggtagtaactgttcttgccgatggtgtcgaactgcacgtacgcgccgagatcgatcatcttcaaaatgttgtcgaggttgtctttcagatcgcagtgaccaacggtgacgcggctaagatcaaccccgtgggcttgtagcaacgccagttgctccagccccatcgtgctgaagctcgtatgcgtggagatcgggcgtccggtctggttatgcgccagcgcagcggcaataaataccttctcttccagcggcgtaatctttccttcgctggtgccgatctccgcgatgatcccggctttcagctccgtgccatcgataccctgttcaatttcatcgaccatctcctgcgccagttcctgcacgctgcgggtcgccacatgttccgggaaaaacgcgtcctggtaataaccggtacaggccaccacgttgatccccgtctcgcgcattacatcaagcataaattgcgcattgcgccccatgtaacggttggtcatctcaatcacattacgcacgccccgggtcatcaggtcgttcatctcctggcaaatgaacgcatactgatcaaggcggcagtccacgttgtttttaaagccggagagatcaatatgcagatgctcatgggcgagggtgtaacccgtcggatcaaaactcatagggtgtctcctgcaaaccggagggaggaaagaaaagagcgaccattttgtggcggtggcgcgcggaaaaattcacacacggtagcccccacatcagaaagcgtggtgcgcacaccgagctgcgtagcgatcatcccttgctgataaaccagcactggcaccacttcgcgggtatggtggctgtgaccaatggtcggatcgttgccgtgatccgccatcacgaccaggcaatcatctggctgcatcgcctcaacaagccgggcaaggttacggtcaacgacctgcaaacgttcggcataacgtgcgacgtcttctgcatgaccagcgaggtcggtttcctgaatgttggtgcaaataaacgccgtcggatgggtgttaaattcgttgagggtgatatccataatccgctggctatccaccagattttgccagctcacgccataaggattgttgacgatatctgccaccttacccaccagcacggttggcacgcctgcttcatacagtttttgtggcacctgcactttttcatcgacgccatagcccatatgcacgacctggaaaccgttgtcataagcgccagaacgcggcgcattgataccaataaagcgcccttctttgctttctgcggcatcgagaatgcgttgactgtcggttaacaggccaccaaatgtaatgacccgaccgacctgtacctgctcacgcacgatacgaccaattttgattgcgtcgtcaaaagagatcacagagagattggcggtaatgttatagacctggcctaaatccgcctcgagattatcgccaatcgcaaccgcctgattgacccacagaaattgcagatcatcgccacggcgctccacctgccagccagcggaaactaatgcctgctcaacacggtcaatcacatcgcgaaaaggcatccgcagcggcggtaacgggcgcgtgcctaaaatttcctgatgccccataaaggtatcgccaccttcatgttgcagctctgccacgccccaggttgcggaatcactcggctgcatatcgcctggcgcataacccaatgcgttgattagccccagcgtctccagcgttggtagctgcaaatgcggcaactggctcaggatgtgaccacatgtattcgctcccgcatcttgcggacgcaccagcgtgacatctttcattgcccctacgccaaagctatcaatcactaacaccacaaatcgcgccattacgcccccagagagtttccaagactgtcataacgaccgacgatttccggttcgccacgatgaataccggacaccagcaccacatcgctacgggtgacaaaaatctgcgtgcgaaaacagagcaccactgcactgcttaccggaaactcgcctgccagcggcagggtgtagtcgatactgctgtcatccacagttttgagattggtttcagtaatcttttgattttctggcgtaaacaccaacgcatgttgcgcatgaccacgacgatagtaaccgccgccgtagcagtagctgtcgccacggaaatgatgggagatttcacttaaccagagcatcgcgatacgttcaggctgatcgccctgctggtttgccggaatagtgcccgtcagcgcatgaccgggttcggcatgagtcacaccgtattgcgccagtaatggcaggctagtgcagctggtcgcactaggcgcgttcagttgctcaagtgcaataccagatttcgccagttgatcccgtgcctgtatcagcgtgtgaagattcggtgtcggcaaaacttttccgacagcctcatcccaaagcaggcaagggaaatgggtaagtccggctaaatgcagccctggcagattctggatttcggcgacaatctccggcaacaccttgagggcaaaaccgctctcctggcccggataaagaaaatcatcgtcgctataaactttaagcagcacagactggattcgcccggccttcaccgccgccgcagaaacttcccgcgctttgtcgagagtaaacacggtgatgacgtcggtgccctgttcaacggcgtcagcaacctgatgacaagggatttgtaccagatgcccctgatgcgccacaggcaaaccagcgcggcgcatgactcgcgcctctttgtaatccaccgccacaatgccgctgtagcctaatgccagcaatttttccgccagccacggattacgaccaaactgcttggtcatcagatacagttcaatgccgtaaagccgcgccgtctcaatcagccgcttaccgttttccagtatctgatccacgtcgatcacccagctgtccggggcgatcttgccctgctgccacaggcttagtgcggcggaaatcagcgccgggttctggcgtttcaatgcttctacaaacatcttgttgcctcgtttctgttccttgaattaaatattcatttttttgaatatttaggttgtgcgacgtggatttgtcgggagcttcaaacctcttcgttagcagccatccataatccataaaggttggccagcaaatagccttcttcacacgggttaacttccagtgcgaattccttcaacaacacctgatgcaattgcacaacggcttgccagtggctggattgcgccagttctgccagcaactcgttatccagcggctctatttcttcaccacggcgactgcgcatcagtgcactcgccatatgtgtcatcgccatcgttccttgctcactgcgcaccggcagatggcactctgtttccagtacgttgacgacctgcatcatgcctttgcagatgtccttatcaataacgcctgcctcgcaaagcaggttgagtctggtttccatatcagatgcctttcgtttaataactcggttcctgttccccactcactacccgttgttgatgggcgagcagggcgtgtttatctacaacggcacgcagcagttgttgcattgggtaatcatcgactcgcgtcaggaccacggcttcggtggcctgtaaaaatcgcggatcgtctgtgagcggcgtcgcctctaatcccagcatggtcagttcgttttccgccaccacgttccagatcaccgcatcgacatcgcctttaacaatgcgttgtaaactctcgtgataagagagatcgactcgttccacatcactaccgccaaaaaaaacatcggtcatgattttctgatccgcgctacggttatccagccccacgcgcttcacgtttgcggactcgcctttacggcaaatcaactggtgctcgccaacgtaggtgtgcggccccaactccagcgcgaggcataagcctttttgcgtgagataactttccgccgctagtcggctaaccaccgccatgtcatacacgccattaagcagacactccacgcgaatatccgcgccacgcatgtgcgcatagtaaaaaggaatgccatcaaactgggctttcaatccgctcgccaggccttcgtacaaacgggtatagggcaagggcattgcacataccacgttgttgatatccacatgagtcagcaatgctttgttatccatctcgaccagataactgccattgcgcccacggcgttcaatccgtatcgctccgctactttccagcgttttcaacgcggcctgcgtcaggccaacggaactacggcattcatttgccagctcatctatggttttcaatcgattaccgcacttttcacccaacaaataacgggccagcgtcgtgatgacgacgccttcttttttgataaacgttcgacgcataataaattttcagtaaattgaatatttatatcttcaggaatttgaagataaggcgcaacagcgagatgtggaaacggcgaggcacttcacattttttcggattattgcaaatgaggataaaaaaaccgggtttccccggtttcagagtgatgataaaagcaaaattgcctgatgcgctacgcttatcaggcctacatttccttgcaatatgtgcattactttgtaggccggataaggcgttcacgccgcatccggcatgaacaaagcgcaatttgccagcaatagtgaattacggcttcgccacaaaaccaatcgcttcgtacaccgcttttagcgtacgggaagcgtgcgcgctggctttttccgcgccatctttcatcacctgttgcaggaaggcttcatcgttgcggaaacggtgatagcgttcctgcaattcagtcagcataccggaaacggcatcagccacttcacctttcagatgaccatacatcttgccttcgaactgtttttccagttctgggatgctctggcccgttaccgcactaaggatatccaacaggttggaaacgcccgctttgttctgcacatcgtagcgaactaccggcggctcgtcggagtcagtgaccgcacgtttgattttcttcactacgcttttcgggtcttccagcaggccgataacgttattgcgattatcgtcagacttggacatcttcttggtcggctccagcaggctcattacgcgcgcgccagatttcggaataaacggctccggcaccttaaagatctcgccatacagcgcgttgaaacgctgggcaatatcgcggctcagttcgaggtgctgtttctggtcttcacccaccggtaccagattagtttgatacagcaggatgtccgctgccatcagcaccggatagtcaaacagaccagcgttgatgttctcggcataacgcgcagatttatctttaaactgcgtcatgcgactcagttcgccgaagtaggtatagcagttcagtgcccagcctaactgtgcatgttccggcacgtgggactgaacaaaaatggtgcttttctcaggatcgataccacaagccagatacaaggccagcgtatccagcgtcgctttacgcagcttctgtgcatcctggcgcacggtgatcgcgtgttggtcaacgatacagtaaatgcaatggtagtcatcctgcatgtttacccactgacgcagcgcacccatgtagttaccaatggtcaattcaccactgggctgtgcgccactaaaaacgatgggcttagtcatttttgctttcctgattttcgctatgcggaagccctaatgcgggcagaaggtcatttatagactgataaattacatcaggctggctgagatcgatagcctcgccgtagttatatccgtaggttaagccaacacttgggcaacctgccgcttttgccgcctgaatatcattgcgactgtcgccgacaaacagcatctgttgtggggcaattcccatccgctcagccaccagtaacagcgggtccggatgcggttttttgttttgcacatcatcaccaccaatcaccacgctgaagtatttggcgatatctaaggcttcgagcagcggcgcgacgaacggcgtcggtttgttggtgaccaggcctagcggcaggcctttagcctgcaacgcgcccaacgtatcggcaacgtgcgggaacaaaaacgtcccctcttcggcaacctcgccatagtagcgatcgaacagtttacgcagaatacgtacctgttcttctgccggaatgtcgtcatcaacgggcggtttacccattgttttacgctgagtcgcacgttcctgacgcgcccaggtcaatgcgcgctccatcagaacatctgcgccgttaccaatccaggtaataacgcgttcttcacctgcgacgggcaactccagcgcatacagcgccatatctaccgcagcagcaagaccaggagcactgtcgaccagcgtaccatcaagatcaaaagcgacgccgcgaatatcttcaaacttattcatgacttacctttgccagttcactgcgcatttcatcaatgacttttttgtagtctggctggtcgaagattgcgctaccggcgacgaacatatccgcgcccgccgcagcgatttcgccaatgttgttcaccttcacgccaccgtccacttctagtcgaatgtcaaagccagactcgtcgatacggcgacgtacttcgcgcagtttatccagtgtttgaggaatgaaagactgaccgccgaaaccagggttgacggacatcagcaggatcacatccagcttatccatcacgtaatccagatagctcagaggtgtcgccgggttaaataccagacccgctttacagccattttctttaatcagttgcagcgtgcggtcaacatgctcggaggcttctggatgaaaggtaatgatgctggcaccagcggcagcgaaatcaggcacaatgcgatcgacgggtttcaccatcaggtgtacgtcgataggggcggtaatgccatagttacgcaaggatttcagcaccattggcccaatcgtcagattgggaacatagtggttatccatgacgtcaaaatgcacgacatcagcgccagctgccagggcttttgcggtatcttcacccaggcgggcaaaatcagcgctcagaatactgggggcaatcaaatactgtttcatccgcttctccttgagaattattttttcgcgggactaacgactcctggtttgtacaaagccagcagttcgtccacctttttacgtgtgccgccgttgctgcttatactgcgtcgaactttgacgacatgcaattttgcgcgctgataccactcacgcgttaacatcgtatcgtgattggagatcagcactggaatatggcgctcaaccagaccttcggcgatctccgccagatgcgcttgttgttcaagcgtaaaactgtttgtgtgatacgccgtaaagttggcggtcgcagacagcggtgcataaggcggatcgcaatagacgacggatgcatcatctgcgcgcgccatgctatcggcgtaagactcacaatagaaaaaggcattctgcgctttttcagcgaagtgatacaactctgcttccgggaaatagggttttttgtagcggccgaacggcacgttaaactcaccgcgcagattgtaacgacacaggccgttgtaaccgtagcggttcaaatataaaaacagtaccgcccgacggaacggatcctggcttttgttgaactcttcgcggaactgatagtaaacctcggcgcaatttgtttcgggaacaaacagctcgcgtgcggcctgtacgtactcatcagtacgcatcttcacaatgttatagagactgatcaggtcgctattgatatcggcaaggatataacgagaaaagtcggtgttgagaaacacgctcccggcacctacaaaaggctcaaccagacattcgcccttgggcaaatgccgtttaatatcatcaagcaggggatacttgccccctgcccacttcaaaaaagcgcgatttttcttcatgctgactaactaattacaccttctccggctgtggagaaagctccgacagcatccagcgcttcaggcaactcccgcaacgataaaccattgcgggagataaccttgattacttcagatcggcctgtacctgacgcagcggtttcgcccacgggtttttggcctggacatctgctggcaatgtagataccgcttttttcgcctcttctttgctagcgtacacgccagaaaccaggacataccacggctgaccattacgcgtcgtttcatagacaacgtagtttttcagattctctttcttcgcccaaccgttcaggttgtcgtagttagaggaactgctcagctgcagagtgtaatggctggacggtgcgcttttcaagctaccaacattacctgcggtcttcgccccagcagcgggtgttgctgtggtttgcgccggggatgccgtctgtactggagccgtagtcgccgtctcttttggtgctggcgtagaagtcgcagccggtgccttcgtgctcgccacaggggcagctggttcagtacgcttcggcgtctgtgctaccggcttcggctccgttttcacggttgcttgcggttttttcggttcaatcaccgcctgctgacgagctgggcgcgtagtggacggacgttcagcggtttgcgttttcgccgtgtcacggcttgcattgccattgcgaacaggcgcaaccgttgcgggttcagtcggcaacgtggaattgaccgccacattgttcagctgttgctgattttgtggctgggtcagcgcattgttcaggtcaccctgcacttcaacacgttgttgaccatccgttgccaccggggtttgcccttgagtcggcgtagaagagatcggtggcagagaaacatcctgctgagtattttccgcagacgtggttcccggcgctggctgcacgccattcgcctgatcggtcgcattgccagcaagatcaatactcttctcgccagacgcggtttgatcgctggaagtggtgctgggggcttttagcgcagaaccgataccgatgatcaacagcagtagaaccagaatgccgacgcccatcatcatatactgacgagaagcgggtttactggctgcttttttgcgcttacgcggacgacgctctacgcgctcttcatccacggtttcatcttcggattcgtcaatttcttcttcgatttccggttcctcattgcgctctttttgcgcacgagtcggacggcgatcgtcagtgtcatcaagttcaatatcatcaaaattgatctgcggttcgccacgttcagtacgctcagaacgttcagaagattgacgagaacgaccagtacgacgatcgctgggatcgggtttcagctcgtcttctggtttgaattcatccatttaacaccccactaaaaggttaatgcttaccacgttgcaattaacctgaagctaatagaccgcttgataagcggcctgacctttcttgttgttacgcactttgacaatcggcaatggcgttaagaacaagctcgtggctaacgccgctgcgaacttcactcttaccaattgccaacggaagaattaagcgcatctctcccgcaaggactttcttgtcacgcagcatatgcggtaaatacgcctgcgcggacatttcgcgcggcccattgaccggtaacccagcccgcttgagcagggttataatacgctgcgtttcggcagaactaaactgcccgagacgttcgctcgtccgcgccgccatcaccatacccgcagcgaccgcttcaccatgtaaccaattgccataccccatttcagcttcaatggcatgaccaaaggtgtgtcccagattcagtaaagcacgtaacccggtttcgcgctcgtcggcggcgacaacttctgccttcagttcacaacaacggcgaatacagtacgccattgccggaccgtccagacgcaacaacgcatccagattctcttccagccagttaaaaaacgcaccgtcaagaataatgccgtatttgatgacttctgccagcccgctcgctaactcacgcgggggaagcgttttcagacagtcgagatccaccaccacactagcaggttggtagaacgcgccaatcatgtttttaccgaggggatggttgaccgcagttttgccgccaacggaggaatcgacctggctcagtaacgtcgtcgggacttgaatgaaacggacaccgcgctgataactcgccgccgcgaagccggtcagatcgcccactacgccgccgccaagcgccaccagcgtagtatcgcgaccatgcggtttttgtaacaacgccgtaaagacggtatcgagtacagccaggcttttatactgctcgccgtcagggaggataacgctatcgacgttaacacccgcctgttcaagtacgccgcggaccttatcgagatacagaggagccagggtttcgttggtgaccaacatgacctgctcgccgcttttcagcggtaagaaactagctggttcattaaacaaaccagatgcgatggtaattgggtaactacgttccccgagagtaacgacaatcctctccataacgcgacatccaccttaattactgtacccgcagacgagtgtatataaagccagaattagttgctttccagcatgtgaataatctggtttgcaaccactttagcgctttgatcatcagtacgaatggtcacgtcggcaatctcttcatacagcggattgcgttcattggccaacgcttccagaacttcacgcggcggtgtttcaacgtgcagcaacgggcgttttttatcacgctgcgtgcgtgcaagttgcttttcgatggtcgtttcaagataaacgacaacgccacgagcggaaagacggttacgcgtttcacgggatttcacagagccgccgccagtagccagcacaataccctgtttctcggtcaactcattgatgaccttttcttcgcgatcgcggaagccttcttcgccttctaaatcgaaaacccagcccacatcagctccggttcgtttctcaatctcttgatcggaatcgtaaaattccatattgagttgttgagctaactggcgcccaatagtgctttttccggcacccataggcccaaccagaaagatattgcgtttctctgccattttttcggtactactaagactattcgttaatgataaacccgcttcgctcagagagcgccgcaggacatgaactgaaacctcataagatattgcgagagtcagactgaaaattatctcaatactccagcgggtttggcaactgaataaatcacccatccctctgcatatctggtcgctgcaagcgcgctgccttgctaccaccgctctggcgataaatcaccgggtaagattagcgtaaaaaagacagcaaaatgccgcctgaatgataaatcatcatcatggaacgcaggcagcgaagagcaccaactctcaaatcggtactccttgtatgctaaatacctgcgcgcgtcaaatagatgaaacacgttcagcgtaaaaacattaccgcttttacggctgtttactcactggaaaccagtcgtggcgtgataaacaccactaactcgcgtcgttcatcttcttttccgtcatgacgaaatgattgcccgaaccagggaatgtcgccaagcaacggtacgctatcctgaccgcttttatttttacgggtaaaaatgccgcccagcgccaacgtttctccgcttttgacctcgacctgcgtttcgatctcctgcttatcaatcgccagcacttcgccatcggcctgctgtagcacctgccccggaacgttctggctgatgtgtaatttcagccggatgcgacctttttgtaacaccgtgggcgtgacctccatccccaggacggcctctttaaattccacgctcgtcgcgccactttccccgctggaaacctgatatggaatttcgctcccctgtttaatgctggcaggctgaagatgactggccagcagacgcggactggcgataatatccagctgctgtttttgttcgagcgcggaaagctcaagatccagcaagcgtccgttgatgcgcccaatgttaaaaccgacatgcgttgtcgccgtcgctacggagaggtcgctaccaagcgtggtgacttgcccaacgccaccagcgtgttgcgcatcggccagcgtccatttcacgcctaactcacgcaaacttttttcattaatggtgacaatatgcgcgctcagctcaacctgcccgaccggcagatccatttgcgctacccactgttcaagcgcgcttaacgccgttttgttatctcgtagcaaaaggcgattggtgcgtttatcgacggtcatactccctttggcactcagtagcttctcccccgctttcgccagttctcccgcgtcggcgtattgcagggttatactgcgattttccagcggcagatttgcctgcgcccgcgcctgctccgcctcctggcgggcgatattgttattctgccaggcaatggaatgcacactgagaatgttgccttcctgccgcgttatcagtccggcgcttttcactacagtttgtagtgcctgcttccagggaacatctgttagatgtaagctcaccgtaccgctgacgtctgggctcacgaccaggttcaacttctcctgttcagccagcgcctgcaacacctgagctaccggaacgtcatccaccatcagcgtcactttttgcggctttgccgcctgtacgccgggtatcagcatcaacagtagtgcggctatccattgcttcatttgtatctccttgccgttgccacaaccattgtggcggttcgcagtttgtcccggtacccagcgttagtacgtctggcgtcagctgtaaaattgtccagccgttttccagcacatcgttttgctgcacccgtcgccatttcttttgcccgtcttttattacaccgatgatgcgctcgcctcgccctaccatcccctgatagcgccactggctaagttcgctaatccggcatagatcttccggcggtttaaaagggtcacgcataccggttaaaaggcacaatgcaatacctgccaacaaccagcgtttaaccctcatgcggcgtctccagttgtagcgtgaacaaaagatcatcaccttccacgcttaagctaaaacggctcacgctgacgttgcgctctgccagccgtgtaaatgcgctcggcactgcttcccacagcgttttcaacgccaactcgcctccctgcgcggatggatgccaggaaaccagttgcgcgccggataactgaaaatccagtgggctaaagggcagcgttttttcctcgctgaagggagcggtgtctaccaggcgatacagtgcggcccactgctggtgatgacttgcccgtagtcgaattaatgcgtcgcgctcttcatggtgtgtgctactcagaaaaatgagcgtaactaacatcagcaaccagaatgcccagcaaagctggcggaggcggggacttgtggcgaaccaccagtcaaagaacatgttcatcgctaaccttccttgttaactgatactcaaattgccagcgtccctgcgcatcctgctgcgtggctccccgctgattgagatgaaaagatgcatcctggcggagactcgtttctagtgcgtttaacgcggtaatgcttgttgtcagccccttgatctccagcgttccctgctgccagcttatcgttgtcagccaggcgtgctcgggtaaaagcgccgccagtgcttccagcgcagattgccagtcgcgggtaaattgtcgctggcgctgccgttggctacgctgttcgcgtaactgctgttgctccagcaaacgtggcttcgttatctgtaagctgcgggcgagttgttgttccgcctgaagcaaaactgcgtctatgcgcgcttcggcgctgcctgtcagacgcagtattagcgttatcccgacggccagcagcagaggcgcaacgaacatcagcaaccagaaacgcagaaaagcggtccggcgttgctgtcgccagggcaaaaaattaattggcgggttcatcagtacgccttcccaagcgccagccccagcgcgatggcaaagtctccacctggcggcggtagcggcggctgacgaacagaaacggcctcccagggatcaaatccgccttcgccacatatcgcgacgctttcgggatcaacggataacgctgccgccagctccttcgcgctagtcatccccaccgccagtttgcgcccccagctatagcgcgtcgcccacagccactgttcgttatcacgccaggccagacattgctgatgagaaggtaaaaaaggcaggaatcgctgtaatgcactggcatccggggtgatcgcgctcacatgaacacgcaacctttctgccagagtaagcagcgttgccagctctttgctttgcgcggcagtcacgttataggcgggactgagactgtcttcgctgtaatcgaagcgcagggagtccggatccatatccagctcgcgggccatcgtcccactcagccaggccgtttgctcccgctcaccaagggacatgctcgggcgcggaaaactccgctgtaatgtgcgactggcgggaaacgccaacataatgtgatgacgctgcggcagttcgcgactccacggtaacaacgttttagccagctgctgcgcatcaacaatccgcccatctttgataatgtcgttctccagcggcaaccgccaccagcgttgcaaaaagcattcttttgcgccccgcacgatcgcaaccgctaccgcttcttgctgttgtaaatgcaaaccaatttgccagatcttaaatgccattgtgatgatctccttatcacccgtcactctgacgggtatatcaatgcgtctggcttgcctttatactaccgcgcgtttgtttataaactgcccaaatgaaactaaatgggaaatttccagtgaagttcgtaaagtattttttgatccttgcagtctgttgcattctgctgggagcaggcagcatttatggcctataccgctacatcgagccacaactgccggatgtggcgacattaaaagatgttcgcctgcaaattccgatgcagatttacagcgccgatggcgagctgattgctcaatacggtgagaaacgtcgtattccggttacgttggatcaaatcccaccggagatggtgaaagcctttatcgcgacagaagacagccgcttctacgagcatcacggcgttgacccggtggggatcttccgtgcagcaagcgtggcgctgttctccggtcacgcgagtcaaggggcaagtaccattacccagcagctggcgagaaacttcttcctcagtccagaacgcacgctgatgcgtaagattaaggaagtcttcctcgcgattcgcattgaacagctgctgacgaaagacgagatcctcgagctttatctgaacaagatttaccttggttaccgcgcctatggtgtcggtgctgcggcacaagtctatttcggaaaaacggtcgaccaactgacgctgaacgaaatggcggtgatagccgggctgccgaaagcgccttccaccttcaacccgctctacagcatggatcgtgccgtcgcgcggcgtaacgtcgtgctgagccggatgctggatgaagggtatatcacccaacaacagttcgatcagacacgcactgaggcgattaacgctaactatcacgcgccggagattgctttctctgcgccgtacctgagcgaaatggtgcgccaggagatgtataaccgttatggcgaaagtgcctatgaagacggttatcgcatttacaccaccatcacccgcaaagtgcagcaggccgcgcagcaggcggtacgtaataacgtgctggactacgacatgcgccacggctatcgcggcccggcaaatgtgctgtggaaagtgggcgagagcgcgtgggataacaacaagattaccgatacgctgaaggcgctgccaacctatggtccgctgctgcctgccgcagtcaccagcgccaatcctcagcaagcgacggcgatgctggcggacgggagcaccgtcgcattgagtatggaaggcgttcgctgggcgcgtccttaccgtagcgatactcagcaaggaccgacgccgcgtaaagtgaccgatgttctgcaaacgggtcagcaaatctgggttcgtcaggttggcgatgcatggtggctggcacaagtgccggaagtgaacagcgcgctggtgagcatcaatccgcaaaacggtgccgttatggcgctggtcggtggctttgatttcaatcagagcaagtttaaccgcgccacccaggcactgcgtcaggtgggttccaacatcaaaccgttcctctacaccgcggcgatggataaaggtctgacgctggcaagtatgttgaacgatgtgccaatttctcgctgggatgcaagtgccggttctgactggcagccgaagaacagtccaccgcagtatgctggtccaattcgcttacgtcaggggctgggtcagagcaaaaacgtggtgatggtacgcgcaatgcgggcgatgggcgtcgactacgctgcagaatatctgcaacgcttcggcttcccggcacaaaacattgtccacaccgaaagcctggcgctgggtagtgcgtccttcaccccaatgcaggtggcgcgcggctacgcggtcatggcgaacggcggcttcctggtggacccgtggtttatcagcaaaattgaaaacgatcagggcggcgtgattttcgaagcgaaaccgaaagtagcctgcccggaatgcgatattccggtgatttacggtgatacgcagaaaagcaacgtgctggaaaataacgatgttgaagatgtcgctatctcccgcgagcagcagaatgtttctgtaccaatgccgcagctggagcaggcaaatcaggcgttagtggcgaagactggcgcgcaggagtacgcaccgcacgtcatcaacactccgctggcattcctgattaagagtgctttgaacaccaatatctttggtgagccaggctggcagggtactggctggcgtgcaggtcgtgatttgcagcgtcgcgatatcggcgggaaaaccgggaccactaacagtagcaaagatgcgtggttcagcggttacggtccgggcgttgtgaccagcgtctggattggctttgatgatcaccgtcgtaatctcggtcatacaacggcttccggagcgattaaagatcagatcagtggttacgaaggcggtgccaagagtgcccagcctgcatgggacgcttatatgaaagccgttcttgaaggtgtgccggagcagccgctgacgccgccaccgggtattgtgacggtgaatatcgatcgcagcaccgggcagttagctaatggtggcaacagccgcgaagagtatttcatcgaaggtacgcagccgacacaacaggcagtgcacgaggtgggaacgaccattatcgataatggcgaggcacaggaattgttctgattaaaaaggcgcttcggcgccttttcagtttgctgacaaagtgcacttgtttatgccggatacggcgtgaacgcgttatccggctaacaaaatcgtgaaaactcaataaattgcagaaaccccataagcctgataaacattgtgcatcaggcaaacttcacgcatttacactcgcccctgccctttcaaccattcgcgcacgaggaacagcgcactgacattgcgcgcttcattgaagtcagggtcttccagcaaatccatcatatgcgccagcggccagcgcacctgtggtagcggctctggctcatcgccttccagactttccgggtagagatcttgcgctaccacgatattcattttgctggaaaagtaagacggtgccatgctgagcttcttcaaaaaagtcagatcgttcgctccaaatccaacctcttcttttagctcgcggttagcggcttcgtagacgctttcacccggatcaattaatcctttgctaaaacctaattcgtaggattcagttcccactgcgtattcgcggatcaggatcaggtgatcgtccacaatcggcacaatcatcactgcttcccggttggttggacgcattcgttcataaacacgccgcacgccattgctgaactccagatccacgctctcgacggtaaacagtcgggaacgggctacagtttcaacattcagaatggtgggtttttgtaaacttttgctcatcgtgggatctatgctgtgaaatcagcggttattgtgcgatatcggacacgctttcggcaatgtgaattgcatgttatttacatttatgtaacttaataaataatcgtcctcaaatcaaattaaaagtcaataggttgaaataactccaggaatttgctgatattccgccttcagagggtttgctatgatcagcggttactgtgatgtgcttaatgatgctcaagttaaactccacgcttgccgatagccaaccgcagaatcatgtattgtgtccggtgcgactgaccacgcctgacagactaagtaagatggggaaagcatgagcaccattgtgatttttttagctgctttgctggcctgcagtctacttgcgggatggctgataaaagtgcgatccagacggcgtcagctgccctggaccaacgccttcgcggatgcgcaaacgcgtaaactcacacctgaagaacgtagcgccgttgaaaattatcttgagagcctgacgcaggtattacaggtgcctggcccaacgggagccagcgcggcaccgatctctctggcgctgaatgccgaaagcaacaacgtcatgatgctgacacacgctatcacgcgttacggcatctctaccgacgatccgaataaatggcgttactacctcgatagcgtagaagtccacctgccccctttctgggaacagtacatcaacgatgagaataccgttgaactgattcataccgatagcctgccgctggttattagtctcaacggtcatacgctgcaggagtacatgcaggaaactcgcagctatgccttgcaacctgttccgagtacgcaggcgagcattcgcggggaagagagtgagcaaatcgagctactcaatattcgcaaagaaacgcatgaagaatatgcgctgagtcgtccgcgcgggctgcgtgaagcgttgctgatcgtcgcctccttcctgatgttctttttctgcctgattaccccggatgtatttgttccgtggctggcaggcggcgcgttactgctgctgggcgcaggtctgtgggggctattcgcgcccccggcaaaatcctccctgcgggaaattcattgtctgcgcggtacaccccgtcgttggggattgtttggcgaaaacgatcaggaacagatcaacaatattagtctcggtattatcgacctggtctatcccgcacactggcagccatacattgctcaggatctcggtcaacaaaccgatatcgatatctatctcgaccgccatgtagtgcgtcagggacgatatcttagcctgcatgatgaagtaaaaaactttccgttacagcactggctgcgcagtacgattatcgctgcgggcagcctgctggtgctgtttatgctgttattctggatcccgctggatatgccgctgaaattcactctcagttggatgaaaggcgcgcagaccattgaagccaccagcgtaaaacaactggctgacgctggcgtgcgggtaggcgatacattgcgtattagcggtacgggaatgtgtaatattcgaacttccggaacctggagcgcgaaaaccaatagtccttttttaccgtttgactgcagccagatcatctggaacgacgcccgcagtttgccattaccagaatctgaactggtcaacaaagcgacggcattgactgaagcagttaatcgccagctgcaccctaaaccggaagatgaatctcgcgtcagtgccagtttacgtagtgcaattcaaaaatccggcatggtattgcttgatgattttggcgacattgtactgaagacagcggatttatgttctgccaaagatgactgtgtgcgactgaaaaatgcgctggtcaatctcggcaacagtaaagactgggacgcgctggtaaaacgcgccaacgccgggaagctcgatggcgtgaatgtgttattacgcccggtgagtgcggaaagcctggataacctggtggcaacctccaccgcgccgtttatcacgcatgaaacggcgcgagcggcacaaagtctaaacagtccggcccccggcggattcctgattgtcagcgacgaaggcagcgattttgttgatcagccctggcctagcgcaagtctttacgactacccgccgcaagaacagtggaacgctttccagaaactggcacaaatgctgatgcatacgccgtttaacgccgagggtatcgtcacaaaaatcttcactgacgccaatggtacgcagcatattggccttcatccgatcccggatcgttccggcctgtggcgctatctcagcaccacattgctgctactgacgatgctgggtagcgccatttacaatggcgtacaggcctggcgtcgttaccagcgtcatcgcactcgcatgatggagattcaggcctattatgaaagctgcctgaacccgcaactgatcacccctagtgaaagccttatcgaataacacgtttgcgcggcaggttatgctaccctgtcgcgcaaattgcttcactctggagatttccctcatgcatatcaacattgcctggcaggacgtagataccgttctgctggatatggacggcacgttgctcgacctcgccttcgataactatttctggcaaaagctggtgcctgaaacatggggcgcgaaaaacggggttacgccacaggaagcgatggaatatatgcgccagcaatatcacgacgtacagcatacgctaaactggtactgtcttgattactggagtgagcaactgggtctggatatctgtgcgatgaccaccgagatgggaccgcgtgccgtactgcgtgaagataccattccgtttcttgaggcactgaaagccagcggtaagcagcgaattttgctcaccaatgcgcatccgcacaacctggcggtaaaacttgagcataccggtctggacgcacaccttgatttattactttccacccacacatttggttatccgaaagaggatcagcggttatggcatgcggtggccgaagctacgggtctgaaagctgaaagaacgctgtttattgatgacagcgaagcgattctcgatgctgccgcgcaatttggtattcgttactgcctcggcgtgactaatcctgattccgggattgccgagaaacagtatcaacgccatccgagtctgaatgactaccgccgcctgatccccagcctaatgtgaaggagacgccatgaaagagaaacctgctgttgaggttcgactggataaatggctatgggctgcccgtttttataaaacccgcgcgctggcccgtgaaatgattgaaggcggtaaggtgcattacaacgggcagcgcagcaagccgagcaaaatcgtcgagctgaatgccacgctcactctgcgccagggaaatgacgaacgcacggtgattgtaaaggcgattactgaacagcgtcgccccgccagcgaggcagccttgctgtatgaagagactgcggaaagtgtagagaaacgcgaaaaaatggcgctggcacgtaaacttaatgccttaaccatgccgcacccggaccgacgcccggacaaaaaagagcgccgcgacctgttacgatttaaacacggcgacagtgaataactgtcacctgcaagagagatgattatgccgcaacatgaccaattacatcgctatctgtttgaaaactttgccgtgcgcggcgaactggtaaccgttagcgaaaccctgcaacagatccttgagaaccacgattatccgcagcccgttaaaaacgtgctggcagaactgctggttgcgaccagcctgttaaccgctacgctgaagtttgatggtgatatcaccgtacagctgcagggcgacggtccgatgaatctggcggttattaacggtaacaataaccagcagatgcgcggtgtggcgcgcgtgcagggcgaaattccagaaaatgccgacctgaaaacgctggtcggcaatggttacgtggtgatcaccattaccccgagcgaaggcgaacgctatcagggcgtagttggtctggaaggtgataccctggcggcctgcctggaagattactttatgcgttctgaacagctgccgacgcgcctgtttattcgcaccggcgacgtagacggcaaaccggctgcaggcggtatgttgttgcaggtaatgcctgcgcaaaatgcccagcaggacgactttgaccacctggcgacgctaaccgaaaccatcaaaaccgaagaactgctgaccttaccggcaaacgaagtgttgtggcgtttgtatcacgaagaagaggtgacggtttacgatccgcaggatgtggagttcaaatgcacctgcagccgtgaacgttgcgccgatgcgctgaaaacgctgcctgatgaagaagttgatagcatcctggcggaagatggcgaaattgacatgcattgtgattactgcggtaaccactatctgttcaatgcgatggatattgctgaaatccgcaacaacgcgtctccggcagatccgcaagttcattaatgagtatgtccggcagagagggctctgccggattttacgactaatacacctgatgcgctttgtcactcattcagattcacattcagcctttcaccatccactacaagatcgcgccacgctttaggcttcgtccccagttttccatccttcgcagctgtgagtaatttttctttcgttatttcgttcggaagtaaactcatatcaagcgcgtcccattcttttctgtcactgtcaaagccatagacaatgactctgtcatcattaaaagcaaacaggatccgctccgcctgaccatcactattcagatcttgctcgaccaggacgcaggcgtctttttcaatacaggtcatcacgttatagcgatcctggattaaggcgctccagaatgtcgcatcaggtttaacagaaccaggggcaattaacacattatcggctaatactttttcgcttacctgttgctgaagatgttgctctccatctaacgccatcagcagatcccgcgcgcgtttcgggtctttcataaacccggcatcgcttttcaggctctcaagcgcagcacgtccatagcgaccgctctgctcgagcatgtagatagttacctggtcactcgtgtttttgccgctctgataacgcgccatatggctgttcacgctaatgcgcatactgtccagcaccgggctattaagaagcaccagtatcaccaacaccaataagctaaccgcaaggttcactttgccctgaagaacaacgggattttgccctttacgccagacgatgctgacaaaataccccaggctccacaccagtaacaccagcaccgccagcacgccctgcaagcggtcgacagtccagccgtactgagcgacccgcagccataacgcccaggcggcgacgaacacatacagcggagcaaccagcaaagcggttttaatcaggcaacgcaacggccctgtccagggaagactcgctttttgcggatcgcggacaatagccattaagatcaattgcaaaaaggccagcgtcaacagcaacccggcggcggagatgtggcgagaaatcgcgctcaggcccgtaaacggcagggtgatgataaacatcagggttagcaaacttactaacggcagcaaccccgtggcgattaacgtgaacaacttttgaatagagtcgattaaacgactctgtgttcgcgcgaggatcaccgccagcgcggtaaccagacctaacgtgagataaataaaccagtcggttgcaaaaaagagcgtattgaaaaacgtgatgccaacaagtttaaacaactcactccacagtaaaagcaccagccacgtcaagccattggcgagaaaaatcaccagtaatataagtacgttatgccatacactctggtaaaaatagcgatagcggctactgtcattgcggatgcgaaggctttgttgtatccacggtagcaacaacattgccatcaacagcagatagcaaccaaaatcccaaagcgccttttcagctctccaggggttcatgccatcagtttgccacttcagccagccgctcatccccagcgtggcaataaacactagcgccagccatccccaaaggcgcttctgtttaaaagagatcacggagaagagtaaaacggaactaaacgcgacggtcgcaggcacgccataaacaatccaactgtgattttttccggaaagccaggcgatcagcaggtagcaaaccagaccctgaagtaatccggtagcaatcatcccccagcgtgttgcgggactaagttcaacgttatccatgttggttatccagaatcaaaaggtgggttaattatcgcatccgggcagtagtattttgcttttttcagaaaataatcaaaaaaagttagcgtggtgaatcgatactttaccggttgaatttgcatcaatttcattcaggaatgcgattccactcacaatattcccgccatataaaccaagatttaaccttttgagaacattttccacacctaaaatgctatttctgcgataatagcaaccgtttcgtgacaggaatcacggagttttttgtcaaatatgaatttctccagatacgtaaatctatgagccttgtcgcggttaacacccccaaaaagactttactattcaggcaatacatattggctaaggagcagtgaaatgcgcgttaacaatggtttgaccccgcaagaactcgaggcttatggtatcagtgacgtacatgatatcgtttacaacccaagctacgacctgctgtatcaggaagagctcgatccgagcctgacaggttatgagcgcggggtgttaactaatctgggtgccgttgccgtcgataccgggatcttcaccggtcgtagtccaaaagataagtatatcgtccgtgacgataccactcgcgatactttctggtgggcagacaaaggcaaaggtaagaacgacaacaaacctctctctccggaaacctggcagcatctgaaaggcctggtgaccaggcagctttccggcaaacgtctgttcgttgtcgacgctttctgtggtgcgaacccggatactcgtctttccgtccgtttcatcaccgaagtggcctggcaggcgcattttgtcaaaaacatgtttattcgcccgagcgatgaagaactggcaggtttcaaaccagactttatcgttatgaacggcgcgaagtgcactaacccgcagtggaaagaacagggtctcaactccgaaaacttcgtggcgtttaacctgaccgagcgcatgcagctgattggcggcacctggtacggcggcgaaatgaagaaagggatgttcagcatgatgaactacctgctgccgctgaaaggtatcgcttctatgcactgctccgccaacgttggtgagaaaggcgatgttgcggtgttcttcggcctttccggcaccggtaaaaccaccctttccaccgacccgaaacgtcgcctgattggcgatgacgaacacggctgggacgatgacggcgtgtttaacttcgaaggcggctgctacgcaaaaactatcaagctgagcaaagaagcggaacctgaaatctacaacgctatccgtcgtgatgcgttgctggaaaacgtcaccgtgcgtgaagatggcactatcgactttgatgatggtagtaaaaccgagaacacccgcgtttcttatccgatctatcacatcgataacattgttaagccggtttccaaagcgggccacgcgactaaggttatcttcctgactgctgatgctttcggcgtgttgccgccggtttctcgcctgactgccgatcaaacccagtatcacttcctctctggcttcaccgccaaactggccggtactgagcgtggcatcaccgaaccgacgccaaccttctccgcttgcttcggcgcggcattcctgagcctgcacccgactcagtacgcagaagtgctggtgaaacgtatgcaggcggcgggcgcgcaggcttatctggttaacactggctggaacggcactggcaaacgtatcagcattaaagatacccgcgccattatcgacgccatcctcaacggtagcctggataatgcagaaaccttcactctgccgatgtttaacctggcgatcccaaccgaactgccgggcgtagacacgaagattctcgatccgcgtaacacctacgcttctccggaacagtggcaggaaaaagccgaaaccctggcgaaactgtttatcgacaacttcgataaatacaccgacacccctgcgggtgccgcgctggtagcggctggtccgaaactgtaatgatttgaagctggagaatatctatccagtatcttatagaaagcaaaacgggaggcaccttcgcctcccgtttatttacccttcttttgtcgtgccctgcgcccgcgttaccggcactggcagccaggcgcgaatggaaagcccgccccgctcgctggtgccaagctccagcatcccgttatggttatccacgatacgctgcacaattgccagccctaatcccgtgccgctaatggtgcgcgcactgtcgccgcggacaaacggctggaacaggtgcttacgttgttccggcgcaattcccggaccgtcatcttccacctggaaccaggcgcgattcggctccgttccgctgctgactttgatccagccattgccataacgggcggcgttgaccaccatattcgccaccgcgcgtttgatgctcagcgggtgcattttcacttcaatgctgccggggtaaagcgcggtttcaatttcccgctcatagccactttcggcagcaatcacctcaccgagtactgcattaagatccgccatttccatcggcatctcctgcccggtgcgcaggtagtcgataaactgctcaatgatggcgttgcactcttcgatatctttattgatgctttctgccagatagccatcctgctcgctcatcatctcagtcgccaggcgaatacgcgtcagcggcgtgcgcaagtcgtgacttacccccgccatcagcagcgtgcggtcatccgccagttgcttaacaccagccgccatatggttaaaggcacgggtaacggaacgcacctcgctagcgccatactcacgcagcggcggcggaataatccctttaccaacctgcaaggctgcgtgttcgagatcgaccaacggtcggttctggatacgaataaacagccacgccccgcctatcgccaatagcataatcgccagcgtatagcggaacagcggagagaaatcgccctgatgaatttcggtcagcggcacgcgtacccagatattggggctcagccaggttttcagccagacgacagggctacttttgttgacctcaacgcgcacttccgtcgggccgcccagttgctgcgccatctgatggcttaagaattcatagtgttgcgcccaacgcagacctgcctcttcggcagcctcgttggagtagagagagatccccagctcacggtagatctcccgacggaaagcgggaggcacaaccaactgcgtgccgtcctccagttgcagtttgtcggtcatcaacatacgcacttcgtacgcgaggactttattaaactgctggaggctcggcaaaatcgcgaagttcagcaccaccagataagtcgtcaccaggctggcgaacagcaaggtgacgatgagcaataacgtacgggcaaaactacttcgtgggctgaagcgcaatcgcctcatgctttagagccgtccggtacaaagacgtagcccagaccccagacggtctgaatgtaacgcggatgcgctggatcttcttccaccatgcggcgcagacggctaatctgcacgtcgatggagcgttccattgcggaatattcacgaccacgggcaaggttcatcagcttatcgcgggagagcggctcacgcggatggctgaccagtgccttcagtaccgcaaactcaccgctggtgagcggcatcggctcgtcttcgcggaacatttcgcgcgtaccgaggttaagtttgaacttaccgaaagcaattaccgcctcttcctgactcggtgcgcctggcagttcgttcgcctgacgacgcagcaccgcacggatacgggccagcagttcacgcgggttaaacggttttggaatgtagtcgtcagcgccaatctccaggcctacgatacggtccacttcttcccctttcgccgtcaccataatgatcggcatcgggttgctctgactacgaagacgtcggcaaatgctcaagccatcttcaccaggtaacattaaatccagtaccataagatggaaagattcacgagtcagcaggcgatccatctgttctgcattagcgacgcttcgaacctggaagccttgttcggtgagataacgttccagcagcgcacgcaggcgcatgtcgtcatcgaccaccagaatcttgtagttctcttgcattgtttgtactcccaaaggttcgcaacaatttgtaagcgtgtattcttaaaaaagctcacgttcgtcaccagctaaatctggtatgaatttcagcctaaattgttacaaagcatattaaacagcagcttaagtatacaatttattcggcgaaacattattgattctgttgatatgatcacgttatacccaatgtgcgcattatcaaacagacaaagggaatcaacgagatgaaaacgcccctggttacccgggaagggtatgaaaaactcaaacaagagcttaattatctctggcgtgaagaacgcccggaggtcacaaaaaaggtgacctgggccgcaagtctgggcgaccgcagcgaaaatgctgactatcagtataataaaaagcgtctgcgtgaaatcgaccgtcgcgtgcgctatctcactaaatgcctggaaaatctcaaaatcgtcgattactcccctcagcaggaaggcaaagtcttttttggcgcgtgggtggagattgaaaacgacgatggcgtgactcaccgtttccgtattgtcggctacgatgaaatttttggccgtaaagattacatctctatcgattccccgatggcccgcgcattgctgaaaaaagaagtcggcgatctggcggtggtgaatacccctgccggggaagcgagctggtatgttaatgctatcgagtacgtgaaaccgtaaggaagagtcttaacctcctgccgatggctggcatttttgccagccagtccgtataactatcccctgatttttgatccgaaaagatgaactcaaaccatgatgaatgatagcttctgccgcattattgcgggtgaaattcaggcgcgcccggaacaggttgacgctgccgttcgcctgcttgacgaagggaataccgtgccgtttatcgcacgttatcgtaaggaaatcaccggcggtctggatgacacgcagctgcgtaatctggaaacgcgtctgagctatctgcgcgagctggaagagagacgtcaggcgatcctcaagtccatttccgagcaaggcaaactcaccgatgatctggcgaaggccatcaacgccaccctaagcaaaaccgaactcgaagacctctacctgccctacaaacctaaacgccgcacccgcgggcaaatcgccattgaagcagggcttgagccgttggctgacctgctgtggagcgatccgagtcacacgccagaagtcgccgctgcacaatatgtttatgccgataaaggcgtggcagataccaaagccgcgctggatggcgcgcgctatatcctgatggaacggtttgccgaagatgccgcgctgctggcgaaagtgcgtgattatctgtggaagaacgcgcatttggtttctacggtggtgagcggtaaagaagaggaaggggcgaaattccgcgactatttcgatcatcacgaaccgttgtccacggtgccttctcaccgcgcgctggcgatgttccgtgggcgtaacgaaggcgtacttcagcttagcctgaatgccgatccacagttcgatgagccgcccaaagagagctattgcgagcaaatcatcatggatcaccttggcctgcgcctgaacaatgccccggcggatagctggcgcaaaggcgtggtgagctggacgtggcgcatcaaggtgctgatgcatctggaaaccgaactgatgggcaccgtgcgcgaacgtgcggaagatgaagcaatcaacgtctttgcccgtaacctgcacgatctgctgatggcggcccctgccggactgcgtgcaacgatgggcctcgatccgggtctgcgtactggggtaaaagtggcggtggtcgatgccactggcaaactggtggcgaccgacaccatttacccgcacaccggacaggccgcaaaagcagcgatgaccgttgctgcgctgtgtgaaaaacataacgttgaactggtagcgatcggtaacggtacagcttcccgcgaaactgagcgtttctatctcgatgtgcagaagcagttcccgaaagtgaccgcgcagaaagtaatcgtcagcgaagcaggcgcgagcgtttacagcgcttccgagctggctgcacaggagttcccggatctcgacgttagcctgcgtggcgcggtgtctatcgcccgccgtttgcaggatccgctggcggagctggtgaaaatcgatccgaaatctatcggcgtaggtcagtatcagcatgacgtcagccagacgcaactggcccgcaaactggacgcagtagtagaagactgcgtaaacgccgttggcgtcgatctcaacactgcttctgttccgctgttaacccgcgtggcgggcctgacgcgcatgatggcgcaaaacatcgttgcctggcgcgatgagaacggtcagttccagaaccgtcagcaactgttaaaagtgagccgtctggggccgaaagccttcgagcagtgcgcgggcttcttgcgcattaaccacggtgataacccgctggacgcgtctaccgttcacccggaagcctatccggtggtggaacgcattctggcagcaacacagcaggcactgaaagatctgatgggtaacagcagcgaactgcgtaacctgaaagcgtctgactttactgatgagaaattcggtgtgccgacggtaaccgacatcatcaaagagctggaaaaaccgggtcgcgatccgcgtccggaatttaaaaccgctcagtttgccgatggcgtcgagacaatgaacgacctgcaaccgggtatgatcctcgaaggcgcagtgaccaacgtcaccaactttggcgcgtttgtcgatattggcgtgcatcaggacggcctggttcacatctctagtttgagcaacaagtttgtggaagatccgcataccgtggtgaaagcgggcgacattgtgaaggtgaaagtgctggaagtggatcttcagcgtaaacgtatcgccctgactatgcgcctggatgagcagcctggcgaaaccaacgctcgtcgcggcggcggtaatgaacgcccgcaaaacaaccgcccggcagccaaaccacgcggtcgtgaagcgcagcctgccggtaatagcgcgatgatggatgcgctggcggcggcaatgggcaaaaaacgttaaacgcccgtactggcctacggttcgaatttgcacgaaatcgtagggcagataaggcgttcacgccgcatctggcaacgaacgccttgcctgacataaaagtgccggagaatatctccggcatttttattccacagccaaactcataatatattccggcaatatttatcatttcattaacaactgaaaccttaattaaacattagccagtccgggtaattcactattcgaattatattttcgctgcgatataaccttgagccacatcaacattgagtcagattattattcaaaccaacattcgcacacattttaagtattgctgatagaaaccattctcattatcattgtgttgttgattatttaatctctcctttgttggcaaatcatctggtctcatgtcgctgtcaaacgccccatgaggtagttatccagttaatgagaaacaagtaggcacctatgcaatacactccagatactgcgtggaaaatcactggcttttcccgtgaaatcagcccggcatatcgccaaaaactgctttctcttggcatgttacctggctcctcttttaatgtggtgcgcgtcgctccactcggcgaccccattcatatcgaaacccgtcgtgtgagcctggtattacgcaaaaaagatctggccttattagaagtggaagcggtttcctgttaatacggtgataacaacaatgaaaaaattaaccattggcttaattggtaatccaaattctggcaagacaacgttatttaaccagctcactggcagtcgtcagcgtgtaggtaactgggctggcgttaccgtcgaacgtaaagaagggcaattctccaccaccgatcatcaggtcacgctggtggacctgcccggcacctattctctgaccaccatcagtagccagaccagcctcgatgagcaaatcgcctgtcactacattttgagtggcgacgccgacctgctgattaacgtggtggatgcgtctaaccttgagcgtaacctgtacctgacgctacaactgctggaactcggcattccctgcattgtggcactgaacatgctcgacattgccgagaagcaaaatattcgtattgaaattgatgctctgagcgcgcgtctgggctgtccggtgatcccgctggttagtacccgtggtcgcggtattgaagcgctcaagctggcgattgatcgctataaagctaacgagaatgtggaactggtgcattacgcacagccgctgctcaacgaagcagatagtctggcaaaagtgatgccttccgacatcccgctgaaacaacgtcgctggctgggcctgcaaatgctggaaggcgatatctacagccgcgcctacgccggtgaagcgagccagcatctggatgccgccctcgcccgtctgcgtaatgagatggacgatccggcgctgcacattgccgatgcgcgttaccagtgcattgctgccatctgtgatgtggtaagcaacaccctgacggcagaacccagccgtttcaccactgcggtagataaaatcgtgctcaaccgtttcctcggtctgccgattttcctctttgtgatgtacctgatgttcctgctggctatcaacatcggcggggcgttacagccgctgtttgacgtcggctccgtggcgctatttgtgcatggtattcaatggattggctacacgctccacttcccggactggctgactatcttcctcgcccagggcctgggtggcggcattaacaccgtgctgccactggtgccgcagattggcatgatgtacctgttcctctccttccttgaggactccgggtatatggcgcgtgcggcgtttgtgatggaccgtctgatgcaggcgctgggcttgccggggaaatcctttgtgccgctgatcgtcggtttcggttgtaacgtaccgagcgtaatgggtgcacgtacgcttgatgcaccgcgtgaacgtctgatgaccatcatgatggcaccgtttatgtcctgcggcgcgcgtctggctatcttcgcagtattcgcggctgccttcttcgggcagaacggtgcgctggcggtcttcagcctgtatatgctgggtattgtgatggcggtgctgactggcctgatgctcaagtacaccatcatgcgcggtgaagcgacgccgtttgtcatggagttgccggtctatcatgtaccacacgttaaaagcctgattatccagacctggcagcgtctgaaaggcttcgttctgcgtgctggtaaagtgatcatcatcgtcagcattttcctgagcgctttcaacagcttcagcctgagcgggaaaatcgtcgataacatcaacgacagcgcgctggcgtccgtcagccgggtgatcaccccggtcttcaagccaattggcgtgcatgaagataactggcaggcaacggttggcctgtttacaggtgccatggcgaaagaagtggtagtgggtacgctcaacaccctctacaccgcagaaaatattcaggacgaagagttcaatccggcagaatttaacctcggtgaagagctgttcagtgcgatagatgaaacctggcagagcctgaaagacaccttcagccttagcgtactgatgaaccccattgaagccagcaaaggcgacggcgaaatgggtaccggggcgatgggcgtgatggatcagaaattcggtagcgcagcagcagcttacagctacctgattttcgtcctgctgtatgtaccatgtatcagcgtgatgggggctatcgcccgtgaaagtagccgtggctggatgggcttctccatcctgtgggggctgaatatcgcttacagtctggcaacattgttctatcaggtcgccagctacagtcagcatccaacttacagcctggtgtgcattctggcggttatcctgtttaacatcgtggttatcggtctgctgcgccgcgcgcgtagccgggtggatatcgaactgctggcaacccgcaagagcgtaagcagttgctgcgcagccagcaccaccggtgattgccattaatggctagtcttattcaggtgcgcgatttgctggcgttacggggccgtatggaagcggcccagataagccagacattgaacactccacagccaatgattaacgccatgctgcaacaactggaaagtatgggcaaagccgtgcggattcaggaagaacctgacggctgcctctctggcagttgtaaaagctgcccggaaggaaaagcctgtctgcgcgagtggtgggcgctgcgttaaccttactccatcgcctgttttggaaagcccggtatgcgtctgcatccgggcttttttgcgtgcggctttccataaaaatgcaactcttgcagcacggcgtaagttcctttgaaagcatctcgcagggatgaaaactcgctaatacacaggtgtggagtggcgcgtagagtcgcggcattcaaacaacaggtgaaggaacgccatgagcaaaaagcagagttccaccccacacgatgcgctgttcaaactctttttacgccaaccggacacggctcgtgattttcttgcgtttcatttaccggcacccattcacgcgctttgtgatatgaaaaccctcaagctggagagcagcagctttattgatgacgatctgcgtgaaagctattccgatgtgctgtggagcgtgaaaacggaacaaggaccaggatacatctattgtctgattgaacatcaaagcaccagtaacaaactgatcgcatttcgcatgatgcgttacgctattgccgcaatgcaaaatcaccttgatgctggatacaaaacgttgccgatggtggtgccattgttgttttaccacggtattgaaagcccctatccctatagcctgtgttggctggattgtttcgccgatcccaaactggcaaggcagctttatgcctccgcatttccgctgattgatgtcaccgtcatgcctgatgatgaaatcatgcagcaccgacgtatggcgctgctggagttaattcaaaaacatattcgtcaacgcgacctgatggggctggtagagcaaatggcctgcttattaagtagtggatacgctaatgacagacaaatcaaagggctgtttaattacatactgcaaactggcgacgctgtacgttttaacgattttatcgacggcgttgccgaacgtagtccgaaacacaaggagagtttaatgactattgcggaaagattgcggcaggagggggaacaatccaaagccctgcatatagccaaaataatgcttgaatccggagttcctcttgcagacatcatgcgctttaccgggctgagtgaagaagagttggctgcggcgagtcagtaaagttctgtctcgccatttcaaaagccacttacaccctctgcttcaacgccaccagcaggtgacaaaactcggccggatggctaataaatggcgcatgggccgctttggcgaagatataactttcgctgtgaggccaaagtttatccagcatcggcaccactttgcgcggcaccagaccgtcgagatagccatacaatcgcaaaaacggcatggacacgttttgcagcggctgacggagatcgaccgttttcaggatttccagcccgccattaagcacgtcaacctccggcatcggtaacgccagaacggttttcttcaacgcccgcgcatcctggcgcgccgtttcagtccccatggtttgtaacgccaggaaccgctccactgtacgctgaaaatcatcactgagttgctgctgaaatcccgccagcacgtccggttttatccccggccactcgtcacgagcactaaaacaaggactgctcgccacggtgaccagcgcctgaacacgctcgggatgggttaacgcaatctggcttgccaccagcccgcccagactccagcctaaccaaatggctttatcaggtgcctgttgcagcacggcttcggccatatcagcaagactcagcgcaccaaatccccggctacgcccgaagccgggcaggtcaacaaggtgcagcgtaaaatggctgctaagttcctcgtcaatgcaacgccacacttcggcattcagtccccatccgtgcagcagcacaagatgaacattcccctgacctttggtctgccaccagatgttattcatccgctattgttctcttttgacttacaaggatgaacatatgctaacagtaccgggattatgctggctatgccgaatgccactggcgttaggtcattgggggatttgtagcgtctgtagtcgcgccacccgcacagataaaacgttatgcccacaatgtggattacccgccacacactcccatcttccctgcggtcgctgcctgcaaaaaccgccgccctggcaaagactggtcacggttgccgactatgcgccgccgttaagtccgcttatccaccagcttaaattttcccggcgcagtgaaatcgccagcgccctgagtcgtctgttactattggaagtcttacacgctcgtcgcaccaccgggttgcaattgccggatcgcatcgtcagcgttccgttatggcagcggcgtcactggcgtcggggatttaatcagagcgatttgctgtgtcagccgttaagtcgctggttgcactgccaatgggatagcgaagccgtcacacgtacacgggccactgcgacccagcattttctcagtgcccggctgcgcaagcgcaacctgaaaaatgcctttcgtcttgaattgcccgtgcaaggtcgccatatggtgattgtggatgatgtcgttaccaccggaagtaccgtcgcagagattgcgcagttgcttttacgcaatggtgcggcggctgtccaggtctggtgcctttgtcgaaccttgtaaagcctcgatgatgggcgtattataaccaactaaaatagtcaactattaggccattactatgatccgtatttccgatgctgcacaagcgcactttgccaaactgctggcaaatcaggaagaagggacacaaatccgcgtatttgtgattaaccctggcacgcctaacgctgaatgtggcgtttcttattgtccgccggacgctgtggaagccaccgacacagccctgaaatttgacctgctgaccgcgtatgttgatgagttaagcgcaccatacctggaagatgcagagatcgattttgttaccgaccagttgggttcccagttaacgctgaaagccccgaacgccaaaatgcgtaaagtggcagacgatgcaccgctgatggagcgcgtggagtatatgctgcagagccagatcaacccacagcttgctggtcacggtggtcgcgttagcctgatggaaatcaccgaagacggttacgccattctgcaatttggcggcggctgtaacggttgttccatggtcgatgtgacgctgaaagaagggatcgagaagcagctgctgaacgaattcccggagctgaaaggtgtgcgcgatctcaccgaacaccagcgcggcgaacactcctactactaagttatcccctcttttgtagattgcccgatgcgacgctaaagcgtcatttcgggcctacgttgaacatgtgccagacgttggcgcagcattgctttgtcaaatcctcggttcgtttccccgcgataatatgaccaacctctcataatttaaatttaccccgctctggtgattctcaaacgccagatgttacccgtatcattcacatgggtaccaaacatactcctgacatctgactacaataattagttttagtgggtatcagtcgtggtgccgcaatatctctgttcccgattgggataattagagtttgtcgtcagaaaattgacgttacccataacaaatgaaaggccaggtaaatcatgccattagtcattgttgctatcggtgtaatcttgttgttgctcctgatgatccgcttcaaaatgaacggcttcatcgctctcgtcctcgtggcgcttgctgttggattaatgcaaggaatgccgctggataaagttattggctccatcaaagccggtgtcggcgggacgctcggtagccttgccctgatcatgggttttggcgcaatgctgggcaaaatgctggcagactgcggtggcgcacaacgtatcgccaccacgctgattgccaaatttggtaaaaaacacatccagtgggcggtggtactgaccggttttaccgttggttttgccctgttctatgaagtgggctttgtgctgatgctgccgctggtgtttaccatcgcggcttctgcgaatattccactgctgtatgttggtgtaccaatggcggctgcactgtctgtgacccacggcttcctgccaccgcatccgggtccgactgcgattgccaccattttcaatgccgatatgggtaaaaccctgctgtacggtactattctggcaatcccgaccgtgattctcgccggtccggtttacgctcgcgtgttgaaaggtatcgataagccaattccggaaggtctctacagcgcgaaaaccttcagcgaagaagagatgccgagctttggcgtcagcgtctggacctctctggtgccggtagtactgatggcgatgcgtgcgattgccgaaatgatcctgccgaaaggtcacgctttcctgccggtagcggagttcctcggtgacccggtaatggcaacgctgattgccgtgctgattgcgatgttcacctttggtctaaaccgtggtcgtagtatggatcagattaacgacacgctggtttcttccatcaaaatcattgcgatgatgctgttgatcatcggtggtggcggtgcgttcaagcaggtgctggtagacagcggcgtggacaaatacattgcttccatgatgcacgaaaccaacatttctccgctgctgatggcctggagcattgctgccgtactgcgtatcgcgctgggttccgcaaccgttgcggcaatcactgcgggtggtatcgcggcaccgctgattgcaacgacgggtgttagcccggagctgatggttattgcggttggttccggtagtgtgattttctctcatgtgaacgatccgggcttctggctgttcaaagagtactttaacctgactatcggcgagaccatcaaatcctggagcatgctggaaaccattatcagcgtgtgcggtctggtaggctgtctgctgctgaatatggtgatttgataacactgactgccggatgcggcgtgaccgccttatccggcctacgattcgggatgaattagtaggccggataagacgcgtcaagcatcgcatccggcatcaaccgcactttacttcttcttcgctgcagctctgcgccgtctgtccaaatccttcagcaacttgttcacgccatcatcggcaaacatgctctcaagcgttgcggaaagcttgcgtcgccagtttttatactggtaactggtgccaggaatattcaccggttcggccatatccagccagtcttccggctgtagtcctaacagagcactgttactgtcggcaatgtagcgctgcaaaccacggttcagcgtcggcgtcatgctcatcaagcttgccttatgcccggcacgtttcggcagacaaccatatttatgcagtgcatccagcagcccttgcttcgccagttcgcgatcctgatacagaccgcgcagtaccacttcatccggatacagccccagggttttgcccagcgttagatccccgcactcccagtaaccgcgcagcgttggcaggtcatgtgtcgccgcaaccgccatgctctgctccggatacgctttcggtgcacggaacgtcttctcgtggtcgttttcgaaatagagcactttgtaagagtacacaccgctgctgcgcagcttaccgacaatctctaccggtacggtaccgagatcttcaccaatcaccatacagcgatgacgtttactttcgagtgccagaatgctgagcagatcatccaccggatagtgaacatacgcgccctgatctgccgtctcgccatacggtatccaccacaaacgcagcatgctcatcacatggtcaattcgtaatgcgccgcagttttgcatattggcacgcaacagctcgataaacggttcataggcacgcgcggtgatgatatgcgggtccattggcggtaatccccagttctgccccaacgggccgaggatatccggcggcgcgccaacgcttgctttcaggcaatatagttcacggtcacaccaggtttccgccccaccttccgctacgccaaccgccagatcacgatacaagccaatcggcatttcatagccctggcttatctcccagcaggcggcaaactggctgtaagccagccactgcaaccagagataaaaatcgacgtcatcacgatgttcttcgcagaactgacgcacttctggactatccacgttctgatacatctctggccatgcaggccagccccagcgcatttcgtcctctttcacttgctgggcatgtagcgcatcaaaggctgcctgccagaacaggctgtcgccctgctctgcaacaaactggcgaaacgcggccatctgctcatcatcacgttgcgcgaaacctttccacgccattcgtaatgctgtcatttttagggcggtaaccgtggagtaatcgacccagtcggcatcgcgcgcctgttgcagcgtctgttgcgtggtcggcaactgccaccaggcctgagcctcttcgctaagatggaaatcttcaacggcgttaacgtcgatataaatcacattcagccaacggcgagaagacgggctgtatgggctggcgctctccggatttgccggatagagcgcatgaatcgggttcaggccaatgaagctcccgccacgttttgccacatccaccagcatcgctttgagatcgccaaaatccccaataccccagtttttttcgcttcgcagcgtataaagctgaacgcaggcaccccacagcttttgtttattcagcaacgcctgcggttcgtaacagcgtttcggggcgacaatcacccggcaatgcgcgcgctggtcgtcctgggtgagtgtcagcgtgtgataaccttccggcagcttcgtcggtagattgaacgctttgccccccgttacatggcctttgtactgcgttccttcttcggtggtcagcagccagctatattcgccgctgccctccaccaccatcggcatttttttgccgctggtataaaccatgacattcgggactggcgttaccgccactttcgtggcggtacgttgatgcatcgcgtcaagcaaacgccgtttggtttcggcgctaatgctctgcggtttaccgtgggcattgatgtaattggggctaatccccgccgccagcgcggcattatccagacgtttgctttccatcgagcttccttagcgttttgcctgccagatacgagcctgataatcgcgaatagagcgatcgctgctaaacataccgcagcgggcggtattgaggatcgccgcgcgagtccaggcctcctggtcgcggtacagcacatccacctgcttttgtgcctctacataggctgcgaaatccgccatcaccagatacggatcgccgccctgtttgccgatactgtgcagcatctggtcgaaggcatgcttatcgccgtcgctgtatttaccgctttccagctctttcaatactgcgtccagcaccttatctttcttccgccatttcaccgggtcgtagcctttggccagaattgccttcacttgttccacggtatgaccaaaaataaagatattttcttcaccgactttctcggcgatttcaacgttcgccccatccagcgtaccgacagtaagcgcaccattgagcgccagtttcatattgccggtaccggaagcttctttacctgcagtgctaatttgttcggagatatccgccgccgggatcagtttttccgccgcgctaacgcaataatccggcaggaacaccaccttcaacttatcgccaaccagcggatcgttgttgatcacgtcagccactttgttgatcgcaaagataatattcttcgccaggtagtagcccggtgccgctttcgcgccgaagaggaagacgcgcggtacgcgatcagcctgcgggttttcacgaatttctttgtacaacgccagaatatgcagcagattcaggtgctggcgtttgtactcatgcaaacgtttgatctgaatatcgaaaatcgcctgtggattgatctcaataccggtacgaactttcacaaactccgccagacggactttattcgcctgcttgatctcgcgatattgctgacggaatttcgcatcatcagcgaatttttccagattgatcagctgatcgagatcgttagcccactctttttgcagacttttatccaacagagccgccagtgccgggttgcactgtttgatccagcgacgtggggtaataccgttggtgacgttatggaatttgttcggccatagctggtgatattccgggaacagatctttcaccaccagatcgctgtgcagcgccgcaacaccgttcaccgcgaaaccgccaaccacacacaggttcgccatatgcacttgtttgtcgtgcaccaccgccagtttggcccacactttttcatcgcccggccaggttttctctaccagcgttttaaagcgagtattaatttcgttaataatctgcatgtggcgcggcagtaagcctttcaccagtttcacatcccagcgttccagcgcttctggcatcagggtatggttggtgtaagcgaaagttttgctggtaatggcccaggcgtcatcccagctcatctggtgctcatcgatcagcacgcgcagcagttctggaatcgcgatagttgggtgggtatcgttcagctgaataacttcgtaatccgccagttcgtgcagtttacgccccgccagatgatggcgacgcaaaatatccgctacgctacaggcacactggaagtattgctgcatcaggcgcagctttttaccggcagtatggttgtcgtttggatagagaactttggtcagtttttccgcattgatgccctgctgttcggcacgcaagaaatcaccgtcgttaaatttagtcagatcaaacggatgcgcgtgcgtcgcctgccacagacgcagcggctgcgccacgccattacgatagccgacaacggggagatcccacgcttgaccggtaatggtaaactccggctcccagcgtccgtctttcgtcactttaccgccaatccctacctgcacatccagtgcttcgttgtggcggaaccacgggtagttactgcgatgccagtcatccggcgcttcaacctgtttgccatcgacaaaagactggcggaacaaaccatattgatagttcagaccgtaacccgtcgcagactgaccgacagttgccatactgtcgaggaagcacgccgccagacgtcccagaccaccgttacccagcgccgggtcgatctcttcttccagcaggtccgtcagattgatgtcataagccttcaagctatcctgtacatcctgataccagccgagattcaacaggttgttgcccgtcaggcgaccaatcaaaaactccatactgatgtagttaacatgtcgctgattcgccaccggcttggcgaatggctgagcacgcagcatttcggccagtgcttcactcactgctagccaccactggcgaggagtcatttcagccgcagaatttaagccataacgctgccactgacgactaagcgcttcctgaaattgcttatcgttaaaaataggttgactcataggagttccacttttcttagattttcaacacaacgttatcgctagtttgccaggctcgatgttgaccttcctcatcctgcgggggattaggcagggaggagttgcggggatgagcaaggaaatgtgatctcaaccacttaaagctagtgcaaaccacaggattagcatcaaatcaatgcaatacagcgcagaaaatctgtatctaagtgcaaaaaatggccgttgcgtattttcaaaaagcggaaggtaactctataaattaagtaaaggagtgaaacagtttcataagtaaaatatccagtgtgctccatctcattcttaatagatttattaagatcatctttttagatggcactttcatcaggaatgaagaagaaacccttgcttaaatgaatctgatgaacataagggaaaccagtattcacgctggatcagcgtcgttttaggtgagttgttaataaagatttggaattgtgacacagtgcaaattcagacacataaaaaaacgtcatcgcttgcattagaaaggtttctggccgaccttataaccattaattacgaagcgcaaaaaaaataatatttcctcattttccacagtgaagtgattaactatgctgattccgagtaaactaagtcgtccggttcgactcgaccataccgtggttcgtgagcgcctgctggctaaactttccggcgcgaacaacttccggctggcgctgatcacgagtcctgcgggctacggaaagaccaccctcatttcccagtgggcggcaggcaaaaacgatatcggctggtacagcctggatgaaggtgataaccagcaagagcgtttcgccagctatctcattgccgccgtgcagcaggcaaccaacggtcactgtgcgatatgtgagacgatggcgcaaaaacggcaatatgccagcctgacgagtctcttcgcccagcttttcattgagctggcggaatggcatagcccactttatctggtcatcgatgactatcatctgatcactaatccagtgatccacgagagtatgcgcttctttattcgccatcaaccagaaaatctcaccctggtggtgttgagtcgcaaccttccgcaactgggcattgccaatctgcgtgttcgtgatcaactgctggaaattggcagtcagcaactggcatttacccatcaggaagcgaagcagttttttgattgccgtctgagtagcccgattgaagccgcagaaagcagtcggatttgcgatgacgtttccggttgggcgacggcactacagctaatcgccctctccgcccggcagaatacccacagtgcccataagagcgcacgccgcctggcgggaatcaatgccagccatcttagcgattatctggtcgatgaggttttggataacgtcgatctcgcaacgcgccattttctgttgaaaagcgccattttgcgcagtatgaacgatgccctcatcacccgtgtgaccggcgaagaaaacgggcaaatgcgcctcgaagagattgagcgtcaggggctgtttttacagcggatggatgataccggcgagtggttctgctatcacccgctgtttggtaacttcctgcgccagcgctgccagtgggaactggcggcggagctgccggaaatccaccgtgccgccgcagaaagctggatggcccagggatttcccagcgaagcaattcatcatgcgctggcggcaggcgatgcgctgatgctgcgcgatattctgcttaatcacgcctggagtctgttcaaccatagcgaactgagcctgctggaagagagccttaaggccctgccgtgggacagcttgctggaaaatccgcagttggtgttattgcaggcgtggctgatgcaaagccaacatcgctacggcgaagttaacaccctgctagcccgtgctgaacatgaaatcaaggacatcagagaagacaccatgcacgcagaatttaacgctctgcgcgcccaggtggcgattaacgatggtaatccggatgaagcggaacggctggcaaaactggcactggaagagctgccgccgggctggttctatagccgcattgtggcaaccagcgtgctgggtgaagtgctgcactgcaaaggcgaattgacccgcagtctggcgctaatgcagcaaaccgaacagatggcacgccagcacgatgtctggcactacgctttgtggagtttaatccagcaaagtgaaattctgtttgcccaagggttcctgcaaaccgcgtgggaaacgcaggaaaaagcattccagctgatcaacgagcagcatctggaacagctgccaatgcatgagtttctggtgcgcattcgtgcgcagctgttatgggcctgggcgcggctggatgaagccgaagcgagcgcgcgtagcgggattgaagtcttgagctcttatcagccacagcaacagcttcagtgcctggcaatgttgattcaatgcagcctggcccgtggtgatttagataacgcccgtagccagctgaaccgtctggaaaacctgctggggaatggcaaatatcacagcgactggatctctaacgccaacaaagtccgggtgatttactggcaaatgaccggcgataaagccgccgctgccaactggttgcgtcatacggctaaaccagagtttgcgaacaaccacttcctgcaaggtcaatggcgcaacattgcccgtgcacaaatcttgctgggcgagtttgaaccggcagaaattgttctcgaagaactcaatgaaaatgcccggagtctgcggttgatgagcgatctcaaccgtaacctgttgctgcttaatcaactgtactggcaggccggacgtaaaagtgacgcccagcgcgtgttgctggacgcattaaaactggcgaatcgcaccggatttatcagccattttgtcatcgaaggcgaagcgatggcgcaacaactgcgtcagctgattcagcttaatacgctgccggaactggaacagcatcgcgcgcagcgtattctgcgagaaatcaatcaacatcatcggcataaattcgcccatttcgatgagaatttcgttgaacgtctgctaaatcatcctgaagtacctgaactgatccgcaccagcccgctgacgcaacgtgaatggcaggtactggggctgatctactctggttacagcaatgagcaaattgccggagaactggaagtcgcggcaaccaccatcaaaacgcatatccgcaatctgtatcagaaactcggcgtggcccatcgccaggatgcggtacaacacgcccagcaattgctgaagatgatggggtacggcgtgtaagtttagccggataacgcgccagatccggcttacatctctgcatcattcaatgctcacccgcgttacgccatctgtttctatcaaactaaaccgcaccggcaagaaacgctccaccaccgcgatattggtcagcagatggcaactgggatgggcgaccgtaaattcccccgcgcccgccagcgccatcggtagcaccagttggtcagcaagatattcccccaccgccgccgtgcttgccaggtagcgtttcacctctttcaccaactgtgccgcaaccacctcggcactgacgcgcttttcaccgacgacaaaaaagcgttcggtgatattttcactttcgacttcaaggctgacggtattacccggcccctggtcgcgcggcaggttatgaatattctgttcatgcagggaaaaactccccgccagtgtagcgatttcacgctcagcaacatggcgcggcacaccagctaatagaacttctccacgcatctgcacaatgttcccgcgctcgccaagttgcaaggtgttaaagcttgccacggggctgacttccgttgccaccacaccgcctccggcagggtaaaaaccgtggcgtaacagcgtggtttgctgatgaattcctattttcgccagcagcggctccagcacccggcggataaaatccgcaggcggcgcgctcgggttatcggtgccgccgctcacttcaacacggctaggtccatcggcaaaccacagcgcgggcagcaccgtttgcagcaccagcgtacaacttccggcgctaccgatagcaaagcggtaatcgccgccgcgcacggtgccgggccggaagagcagacgctggctccccagctccgcgccttccacggttgctccgcaaatttccgtcgccgcctttaccgcggtcagatgctggcgcaacagccccggtttcgcccgcccggcacgaatgctggtgatggtaaatggctggccggttatcatgctcaggctcagcgcgctgcgcaggatctgcccgccaccttcgccctgtgcgccatccagcgcaatcatccttttcatcatttatccttttacgcacaccacctgacgcagggtatagataacttccaccagatcgctttgtgccgccatcaccgcatcaatatctttatacgccatcgggatttcgtcgatcacttcggcatctttacggcattccacatgcgcggtggcacgaatttgatcttccacgctgaacagttttttcgctttagttcggctcattacccgcccggcaccgtggctgcagctacagaagctctcttcatttcccagcccacggacgataaagctttttgctcccatgctaccgggaataattccatattgaccagcacgcgcagacaccgcgcctttacgcgtcacgtagatctcttcaccaaagtgctgttctttttgcacatagttgtggtgacagttgatctcttccatcgccagcgtttgtggctgtctgaccgttttctgcgtaatgctctgcaatgccgttaccacgttttccatcatcgcatcgcggttaaggctggcaaaaagctgcgcccaggccacggctttcaggtaatcatcaaagtattccgtaccttccataaagtacgccagatcacggctcggcaacgtctcaagcgtttcctgcatctctttttgtgccagatcgataaagtaagtcccgatggcgttaccaattccgcgactaccggagtgcagcataatccacacctggtcgctctcatcaaggcagatttcaataaagtggttaccggttcccagcgttcccaggtgtttatagttattggtattcaggaaacggggatatttttgcgttaaccactgataaccggcttcaagctcagcccatttagcatcgacgttaacaggtggattttcccaggcacctttatcacgtttacaacggccagtggtacgcccgtgcggcacggccgtttcaatcgcctgacgcagctctgccaggttttcaggcaggtcttccgccgttaacgcggtacgcagcgcgttcattccacagccaatatccacgcccaccgccgccggaataatcgcccctttggtcgggatcacgctaccaatggtggaacctttacccaggtgtacatcaggcattaccgcaatatgtttgaaaataaacggcatcttcgccgtattaataagttgctgacgcgcatcggcctctaccggcacgcctttggtccacatttttaccggggcattttcagtggtcagtaattcgtaattcattttgtttttctcttttcgttgtttgctgtcctgataattgcaaccgtcgtgccagaaaattaaataagcagcttaattttttaattcattgttttaaaaaagattatatctttacgtccgtaaccggagatttcccgcaaagccaatttaccgataatgaaatatcgtcttttataaggatatctaagatgcgtaaaacagtggcttttggctttgtcggtaccgtactggattatgccgggcgcggcagtcagcgctggagtaaatggcgtccgacactctgtttatgccagcaagaaagcttggtcatcgatcgactggaattgttgcacgacgcccgcagccgcagcctatttgaaacgcttaaacgcgatatcgccagcgttagcccagaaacagaagtggtgagcgttgagattgaactgcataacccgtgggatttcgaagaggtctacgcctgcctgcatgatttcgcccgtggttacgagtttcagccagaaaaagaagactatttaattcacatcaccaccggtacccacgtcgcgcagatttgctggtttctgctggcagaagcgcgttacctgcccgcccggctgatacaatctagtcctccgcgcaaaaaagaacagccgcgcggcccaggtgaagtaacgattatcgatctcgatttaagccgttataacgccatcgccagccgctttgccgaggaacgccagcaaacgcttgattttcttaagtccggcattgccacgcgtaacccccacttcaaccgcatgattgagcagatcgaaaaagtggcgatcaaatcccgcgcgccgattctgcttaacggtccaaccggcgcgggcaagagttttctggcgcgacgcatcttagagttaaaacaggcgcggcatcagtttagcggcgcgtttgtggaagtgaactgcgccaccctgcgcggcgataccgccatgagcacgctgtttggtcatgtaaaaggcgcgtttaccggggcgcgggaatctcgtgaaggtttattacgcagcgccaacggcggaatgttgtttcttgatgagattggcgaactgggcgcagacgaacaggcaatgctgctgaaagccattgaagagaaaaccttttacccgtttggcagcgatcgccaggtgagcagtgattttcagcttatcgccggaacggtgcgcgatttgcgccagctggttgccgaaggcaaatttcgcgaagatctgtacgcgcggatcaatctctggaccttcaccctgccgggtctacgccagcgccaggaagatattgaaccgaacctggattatgaagtggagcgccacgccagtctcactggcgacagcgtgcgttttaacaccgaagcgcggcgcgcctggttggcttttgcgacctctccccaggcaacatggcgcggtaactttcgcgaactttctgccagcgtcacgcggatggccacctttgccactagcggacgcatcactctggacgtggttgaagatgagataaaccgtctgcgctataactggcaggagagccgcccctccgcgcttacggcgttgctgggcgcagaggcagaaaacatcgatctcttcgaccgtatgcaactggaacacgttatcgctatctgccgccaggcaaagagcctttccgcagccggacgccagctttttgacgttagccgccagggcaaagccagcgtcaatgacgcggatcggctacgcaaatacctggcgcgttttggtctgacgtgggaagccgtgcaggatcagcacagctccagttgaatatggtggtccgtcagcacctgcatcacgcttactggcggcggggcgtcggtgtagacggcatctaccatgctgatgctgcccatattgaccatcgcgttacggccaaatttcgagtgatcgacaaccagcataacgtggcgcgagttctcaataatggcgcgtttggtgcgaacttcgtggtaatcgaactccagcagcgagccgtcgctatcgatgccgcttatccccagaatgccgaaatcaaggcggaactgggagataaaatcgagcgtcgcttcgccaatgatcccgccatcgcggctgcgtaattcgccaccggcgagaatgatgcgaaaatcttcttttaccatcaacgtgttagcaacgttgagattgttggtgacaatgcgcaaattgctgtgattgagcagtgcgtgcgctaccgcttccggcgtggtgccgatatcgataaacagcgtcgagccattggggatttgctccgccactttgcgggcgatgcgctctttttcttcggtctgggtggccttgcgatcgtgccacggcgtgttaaccgaactggaaggcagcgccgcaccgccatgatggccaggatcaggttttgctccgccagctcattgaggtcgcggcgaatagtctgcgggctgacggagaaatgctctaccagctcttcggtactgacataaccctgctgtttaaccagttcgataataccgttgtgacgttgtgtttgtttcatttataaatccctggaattattttcgttttcgcgcattgaggctatcaacaaaagccatcgctaaacccacggctaacccggcgatgtgtgctccgttcgccatgctcatcccaaacaaatcaaaccatccggcgacaatccagatcagcgcaaagataattaacccacgttgcaggtaaatgccactttgcggatcgcgttcgccacgtagccagacgtagcccatcagcgcatacaccacgccagaaagcccgccaaaccacggcccgctgaatttttgctgcacatagccgcttaacagggcgctgataagcgtaatgacaattagcttaccgctaccgaggcgtttttccaccgcaccgccgagataccaccaccagagcaggttaaagaggatatgcatcaggctgaagtgcattaacgcgtgggtgaagtaacgccagaactcaaatttcagtgttggatcgaatggccaggccagccataacatcacttcctgatcgccgagaatttgcatggcaataaacaccaccacgcaggcgatcatcatcacccaggttaccggacctgcgcgttcacgcaaggcggcaaagaaaggataacggcgataatgcaggccactgccggtatggcctgcctgccagctcgccgccagataacgcggatctgccgggttttcgagaaaacgcgccagctccgcccgtacgcgctcggcctgggactcatccgccagccagacatcgctttggttatgttgttgaatcgtgaggataacaccctgcgtcgccatgtaatcaacaaacgcctgcgccacgcgggggttagcaaaagaggtaatcatcaacatcgttgctgtcgcttattccacacaaaaggggacagtataaagcgttacgcgccgtacgccacctctgcgggaaactgacgttgccaggcttcaaagccgccgtcaatgctatagaccacatcgtagccctgttgcagcagatactgcgccgcgcctttgctgctattgccgtgataacacatcaccatcaccggagtgtcaaagtcgttatcacgcataaaagcgcccagcgtgtcgttggttaaatggaaagcctgcaccgcatgtcccattgcgaaactctgtggatcgcgaatatcgaccagcaccgcctctttttcctgcaacttctggtgcgcgtcggcaacgttaatacattcgaactgatccatgcgtctctctttctttacaaacaagtgggcaaatttaccgcacagtttacgtcgaagcggcagataaacgccataatgttatacatatcactctaaaatgttttttcaatgttacctaaagcgcgattctttgctaatatgttcgataacgaacatttatgagctttaacgaaagtgaatgagggcagcatggaaaccaaagatctgattgtgatagggggcggcatcaatggtgctggtatcgcggcagacgccgctggacgcggtttatccgtgctgatgctggaggcgcaggatctcgcttgcgcgacctcttccgccagtagtaaactcattcacggtggcctgcgctaccttgagcactatgaattccgcctggtcagcgaggcgctggctgaacgtgaagtgctgctgaaaatggccccgcatatcgccttcccgatgcgttttcgcctgccacatcgtccgcatctgcgcccggcgtggatgattcgcattggtctgtttatgtacgatcatctgggtaaacgcaccagcttgccgggaagtactggtttgcgttttggcgcaaatagtgtgttaaaaccggaaattaagcgcggattcgaatattctgactgttgggtagacgacgcccgtctggtactcgccaacgcccagatggtggtgcgtaaaggcggcgaagtgcttactcggactcgcgccacctctgctcgccgcgaaaacggcctgtggattgtggaagcggaagatatcgataccggcaaaaaatatagctggcaagcgcgcggcttggttaacgccaccggcccgtgggtgaaacagttcttcgacgacgggatgcatctgcctagcccttatggcattcgcctgatcaaaggcagccatattgtggtgccgcgcgtgcatacccagaagcaagcctacattctgcaaaacgaagataaacgtattgtgttcgtgatcccgtggatggacgagttttccatcatcggcactaccgatgtcgagtacaaaggcgatccgaaagcggtgaagattgaagagagtgaaatcaattacctgctgaatgtgtataacacgcactttaaaaagcagttaagccgtgacgatatcgtctggacctactccggtgtgcgtccgctgtgtgatgatgagtccgacagcccgcaggctattacccgtgattacacccttgatattcatgatgaaaatggcaaagcaccgctgctgagcgtattcggcggtaagctgaccacctaccgaaaactggcggaacatgcgctggaaaaactaacgccgtattatcagggtattggcccggcatggacgaaagagagtgtgctaccgggtggcgccattgaaggcgaccgcgacgattatgccgctcgcctgcgccgccgctatccgttcctgactgaaagcctggcgcgtcattacgctcgcacttacggcagcaacagcgagctgctgctcggcaatgcgggaacggtaagcgatctcggggaagatttcggtcatgagttctacgaagcggagctgaaatacctggtggatcacgaatgggtccgccgcgccgacgacgccctgtggcgtcgcacaaaacaaggcatgtggctaaatgcggatcaacaatctcgtgtgagtcagtggctggtggagtatacgcagcagaggttaagcctggcgagctaaattaacgtaaggtgatcaggtcagatttcaatctggcctgagactgatgacaaacacaaaactgcctgatgcgctacgcttatcaggcctacgtggtttatgcaatatattgaatttgcatggtcttgtaggccagataagacgttcacgtcgcatccggcatgaacaaagcgcactttgtcaaaaatctaacctactttttaattcagggaattaccgcaaagcccacgccatcatacccaacgtaacaaaactcaggcacgttccccactcgcccgctgaaaaatagcattaatgcgcccagcgccagcataaaaattttgagcagaaggtaaattgttggcgtgataaggatattacaaacttcaataataccggcaagtccgacacccagcatggcaataaccaccgccaaaaattgcgccagtatggggatgccgaaaaaagtcattaccaggctggtcaaaatccattttctgttttgcattattctttccattctttttgaatggtgaaattatactccccgagtccccttgccccttctggacacttttccgaaatgatggcggaaaaaaacgggaccctttggccccgttctatttattggtgaacttacaatctcaccggatcgatatgccagatatgatcggcgtactctttgatagtacggtcagaagagaagtagcccatattggcaatgttcagcatcgcttttgcggtccactcttcctgaagctcgtagagttcatcgactttatcctgacaatcgacatagctgcgataatccgccagtacctggtagtgatcgccgaagttgatcaggctatcaaccagatcgcgatagcgacccggatcttccggactgaatacaccgctgccgatttgcgtcagcacctgatgcagctcctcatctttctcgtagtattcacgcggtttgtagccctgacgacgcagttcttccacttcttccgctgtgttaccaaaaataaagatattgtcagcaccgacatgatccagcatctcgacattcgcaccgtccaacgtaccgatagtcagcgcaccgttaagcgcaaacttcatgttactggtgccggaagcttccgtccctgccaggctaatctgttcagacagatctgccgccggaatgatcaactgcgccaggctaacgctgtagttcgggatgaacacgactttcagcttatcgccaatctgcggatcgttgttgatcactttcgctacgtcattgatcaaatgaataatgtgcttcgccatgtaataggcgctagccgccttaccgccaaaaatattcacgcgcggtacccacttcgcatccgggtcggccttgatgcggttatagcgggtaatcacatgcaacacattcatcaattgacgtttgtattcgtgaatacgtttgatttgtacatcgaacaacgcctttggattcaccaccacattcagctgctgggcgatatactctgccagacgctttttgttctccagcttcgcctgatgcacagcgtgattaaccattgggaaatcacagtgttgttgcagctcattaagcaggctaaggtcggtgcgccagttacggcccaggtgttcgtccagcacggcactaaggcttgggttcgctaccgccagccagcgacgcggcgtcacaccgttggtgacgttggtgaaacgacccgggaagattttcgcaaagtcggcaaacaagctttgcaccatcagattagagtgcagttcgcttacaccgttaactttgtggctcacaacaaccgccagccaggccatacgcacacgacgaccgttggattcatcaatgatgctcgcccgtcccagcagatcggtatcgttcggatactgttcctgcaaggttttcaggaaatagtcgttgatttcaaagatgatctgcaggtgacgcggcagaattttacccagcatatcaaccggccaggtttccagcgcctcgctcatcagcgtgtggttagtgtaggagaagacctgacaacacacctcaaacgcgtcgtcccagctaaattggtgctcatcgatcagcagacgcatcatctcaggaatgctcagtaccggatgggtatcattgagatgaatcgcgattttatccgccaggttatcgtaggttttatgcaactgataatggcggcttaaaatgtcctgaatggtgctggaaaccaggaagtattcctgacgcaggcgcagctcacgcccggagtaggtggagtcatccggatacagtacgcgagatacgttctcggagtggtttttatcttccactgccgcgaagtagtcaccctggttgaatttaccgaggttaatttcgctactggcttgcgcactccacaaacgcagcgtgttggtcgcgtcggtgtcgtaaccagggattatctgatcgtaagcgactcccagaatctcttcggtttcaatccagcgcgtttttttaccttcctgctgaatgcgaccgccaaaacggactttatagcgcgtgttgtggcgtttgaattcccacgggttaccgtattccagccagtagtctgggctctctttctggctaccgttaacgatgttctgcttgaacataccgtagtcatagcggatgccgtaaccgcgccccggcaaccctaacgtcgccagagaatcaaggaagcaagccgccagacgtcccaggccaccgttaccgaggcctgggtcattttcttcatcaatcagctcttcgagatttaaccccatcgcttccagtgcgccctgtacatcttcgtaaattcctaggctcaacatggcgttggagagcgtacggccaatcaaaaactccatgctcaggtagtaaacctgacgagtttcttggctcaactgggcacggttactacgtaaccagcgctccacgagacgatcgcgcacagcaaataacgttgcgttcagccattcatgtttattggcgacgaccgggtcctttccaatcgtaaacatcagcttgtaagcgatagagtgcttaagagcttctacgctaagcgtggggctactatatgtaaacggagcattcatataggcgtttcctgaaaattatttcaagcgatagtaaagctcacggtagctcttcgccgcgacctgccagctaaaatccattgccatagcctgacgttgcacaaaccgccacagactaggacgggaccacagtacaaaagcacgtcgaatagcccgtaacaggctccaggcattactatcttcaaagacaaacccactggcgacgccatctgcaaggttctcaagagaacagtcagaaaccgtatcagcaagcccaccggtgcgccgcactaacggcagcgtaccgtacttcaatccataaagttgcgttaagccgcacggttcaaaacggctgggcaccagaatgacgtccgcgccgcccataatgcgatggctaaatgcttcgtgatagccaatctgaacgcccacctgaccggggtattccgctgccgccgcaaggaaaccttcctgcagcaccggatcgcccgcgccgagtagcgccagctgcccgccctgctccagaagacccggtaaggcttccagcaccaggtcgagacctttctggctggtcagacggctcaccactgcaaaaagcggcactttatcgtcaaccttaagccccattgcgatttgtaactggcgcttattttccgctttatcttccaacgtatcgcgggtgtaacggctggccaacagtaagtccgtctctggactccagattttctcgtccacgccgttcagtacgccggaaagacgcccttcacggtgacgctgttgcaacagaccttccataccgtaggcaaactgcggttcggtgatctcgcgagcgtaggttggactgaccgccgtaatgtgatcggcatagtacagaccggccttcaggaaagagatttgtccgttgaattccagcccatgaatattaaagaaactccatggcaattggatgtcattcatgtgatgtgcataaaacatgccttgataggccaggttgtgcacagtaaacacgctcttcgccggacgcccgcgcgccgccagatacgcaggcgcaaggcctgcatgccagtcgtgcgcatgcaccacatcaggacgccagaatgggtcaagcccgctggccatttctgccccaacccaccccagcagcgcaaaacgcaatacgttgtcggtataggcaaataagttggtatcgtgatacgggcttcccggacgatcatagagatgcggcgcgtcaatcaggtaaatgccaaccccgttgtaatgaccgaacaacagcgtgatatgtccggcgaaggtatcacgacgggatactacctgcgcatcggtcacgccacggcgaatatcgggaaatgcaggcaacagtacgcgagcgtcaacgccgtctgcgatttgtgctgcgggtaatgccccaataacatcagccagaccgccggttttaagcagcgggaacatctcactacatacatgtaaaacctgcattatcgctcctgtttatgccctaacttccgtagcatttcgcgcgttaccagcacgatgccttcttcactacgatagaaacgacgtgcatcttcctctgcgttttcaccaatcaccatgccttccggaataacacaagcacgatcgatgacgcagcggcgcagacggcagctgcgacctacccatacttccggtaacaatacggcggaatcaatgttgcagaaactattcacgcgaacgcggctgaacagaacggactgcaccaccacgctaccggagatcacacaaccgccggaaaccagactgttaagggtcatcccgtggctaccggagcgatcctgcacgaatttcgctggcggtaaactttcattgtaggtgcgaattggccaattgcgatcgtacatatccagttccggcaccacagaggccagatcgaggttcgctttccagtaagcttccagcgtacccacatcgcgccagtacggctcggcatccgggtcggattgtacgcaagagagcgggaacgggtgcgcataggccagaccggcttcggtgatcttgggaatcaaatctttgccaaagtcgtggctggagttctcatcgcgatcgtcttcttccagcagttcatacagatagtcggcgtcaaagacgtagatacccatactcgccagagatttgctcggatcgttcggcatactcggcgggttagcaggtttttcaacgaattcgataattttatcgttctcatcaaccgccataacgccaaatgcggaggcttcttcaatcggtactggcatacaagcaacggtgcaacgtgcgcctttttcgacgtgatcgataagcatacggctgtagtcttgcttgtagatatggtcgcccgccaggatcaccacgtattccgctttataacggcggataatgtcgaggttttgggtgaccgcatctgcggtgccgcgataccagttttcccctttcattctctgctgtgctggcagcagatcgacaaactcgttcatttcttcattgaagaaactccagccgcgctgaatgtgctgcaccagagtgtgggactggtactgggtgatcacgcccatacgacggatcccggagttgatgcagttagacagcgcaaagtcgataatgcggaacttaccgccgaagtgtacggccggttttgctcgcttattggttaaatccttcaggcgggtaccacgtcctcccgccagtatcagggcaacagatttcaatggcagctggcgcgccaacattaagtgatcgttcttctctaaactaaccatgactaactccttttttatcatctctggaacacacacaatccgtgtgcaggtccctgccagacagccgtaatcactgggttatcctctccagcgaatgggggaatggcgtgccactccccagcaggtaaaacaatctctgttacctcaagcgtggcgttaattgcgatcaaaaagcgatcgctgagcagaatttgcagctgtttcggcccgttttgccactcatccgtgcttaaaggttgagcatatcgatttagccaacggacattgccgtcgccttcttcccaccagcgattctccaccaaagcgggaatgcgcttgcgcagatggattaacgcggcggtaaatgcggttaaaccactgcttgcctggctccagtccaaccaggttaattggttatcctgacagtaggcattgttattgccatgctggctgtgaccatgttcgtcaccggccagtaacatcggcgtaccctgggagagcaacaacgttgttaacagggcgtgaatgctgtcgcgccgccgttcaaccaggtcaagagaaccgcctaacccttctttaccatgattgttactgtaattgttgttggtcccgtcgcgattttcttctccgtttgcttcattgtgtttatggttgaagcaaacgcagtcgcgaagcgtaaaaccgtcatgcgcggtgacgagattaatcgcggcactcggcagacgaccattacgtttaaaaacatcgctggaggcagcaaaacgcccggcaaacgcccccagaggcaaatcataatgtagccagaaacgacgggcagcatcgcggaaatgatcgttccactcggcaaacagcggcgggaaatttcccacctgataaccaccaggagcgatatcccacggttcagcaattaacttcacctggctgagcaccgggcagttctggatagcggtaaacaacggcgcatcctgacggaactctggcgtacggcccatgactgccgccagatcaaagcggaaaccatcgacgtggcaggtttctacccaataacgcaggcaggcgctggcataatccaccaccgccggatgactcaaattgagcgtgttgccgcaaccggtccagttgtgataatcgccgtcttctcttatccaataatagctacggttatcgatcccacgcaggctgaataacgggccgtcgaggtccagttccgcactatggttgagcacgatatcaagaatgacttcgatacccgctttatgcagtgctttgattgcatcgcgaaactcatccagcgccgtttctgggctgcaggcatacgccggatgcagcgcaaacatcgccaccgggttgtaaccccagtagttacttagccccatgcgttgcagacgtggttcactggcaaactgcgccactggcagcagttccagcgcggtaatgcccaattgtttcaaatagttgatcatcaccggatgcccgagggctttataagtgccacggatctcgaccgggatctccgggtgcaagtacgttaatcctttgacatgggcttcataaatgatggtgctgccccacggcgtgcgcggcggggcatcatcttcccagtcatagtgatcaaccaccactacgcatttcggcgcaatggcggcgttgtcgcgatagtcaggttcattatgaccggcgtgcagcagcgggttatctttaaactccccgtcaatttgccgcgcgcaaggatcaatcaacaacttcgccgggttaaagcgatgcccctcggcgggttgccaggggccatgaacgcgataaccataacgcaaacccgggcgcgcatccggcagataaccgtgccaaatgtcgccactgtgccctggcaagtcatagcgatgttcctggccattggcgtcaaagacacacagttctacccgctcggcatgagcggagaaaagtgtgaagttgacgccctgaccgtcgtaatgcgcgccgaggggagcgggtttgccaatggcgagttgtgtcattctgcctcccgaaccagccagatagtggccagcggtggtagcgtcaggcttagactatgctgacgaccgtggctggcaatctcatcgctgtgtaccgtgccgccattgcctgcattactgccgtgatagtgcatggaatcggtattgaggatttcacgccatttgcccggctggtttatgccgaagcgataatcatgacgcggtaccggcgtaaagttactggcaacgatgatttcgttaccctctttatcgcgacgcacaaagatcagcacgctgcgttctttgtcatccaccaccagccattcaaagccgtacgggtcaaaatccagttcatgcattgctttatggtggcggtaggtgaggttcagatcgcgcaccagacgctggacaccgtggtgccagttatcgccgccttccaacagatgccagtcgaggctggcgtcatggttccactcgcggccctgggcaaattcgttacccatgaacagtagtttcttgcccgggaatgcccacatccagccatagtaggcgcgcaggttcgcgaatttctgccatgcgtcgcccggcatgcggtcgagaatgctttttttaccgtggaccacttcatcatggctcaacggcaggacgaagttttcagtgtagttgtagagaatcccgaaggtcagtttatcgtgatgatactgacgataaaccgggtcgagcttcatgtagtccagggtgtcatgcatccagccgaggttccacttgtaccagaagcccagaccgcccatatcctgcggacgagaaacgccagggaaatcggtagactcctcagccattgtcaccgcaccggaaacctgctcaccaagaatacggttggtattacgcaagaattcaatcgcttcaagattctcgcgcccgccaaattcgttcgggatccactccccctctttacggctgtagtcgcgataaatcatactcgccaccgcatcgacgcgcagcgcatcaataccaaaacgttcaatccagtaaagcgcgttaccgacgaggaagttactgacttcacggcgaccatagttgtagatcagcgtgttccagtcctgatgatagccttcacgcggatcgctgtgttcatacaagttcgtgccatcaaattcggcaagcgcaaagtcatcagtcgggaagtggcctggcacccagtcgagaatcacgttcagaccagctgcgtgtgcggcatcaatgaaataacggaagtcgtcgcgagtaccaaaacggcgggttggcgcatacaggccggttggctgataaccccaactgccatcgaagggatgctcgttaatgggcagtagttcgaggtgggtaaagcccatccatttagcataaggcaccagttgatcggccagctcgcggtagctcaaccagaaattgttgtcggtgtggcgacgccaggaacccaggtgaacttcataaatagagattggcgcatcaaactgattcgcttttttgcgctcttcagtctgtacaaccttttccggcagcccgcaaataagagacgcggtttccgggcgcatttgcgcttcaaaggcataagggtcggacttcagacgcaagttgccattggcatcaatcatctcgtatttatagagctgaccgttatgcgccccagggataaacagttcccagatgccgctctctttacgcaggcgcatcgggtgacggcgaccgtcccagtagttgaattgcccaaccacgctgacccgacgggcgtttggagcccagacagagaaacgcgtacctgtgacgccatccatagtatctgcatgcgcgcctaaggtttcatacgggcgcaggtgagtaccttcagataatagccaggcatccatttcctggattagcggaccaaaacggtaaggatcatcaatcaggttttgctgaccatgccagacaacagccaactgatagcggaaaaaattcttacgtcgcggaatgacgccgctaaagaatccccgactgtcgagacactccagttttgcgagtttgcgcccggttttcggttcaatcacccacacatcggtagcgtcgggtaaaagggcacggacttccagtcccgcggtggttttatgcattcccagtacggaaaaaggatccgcaaaatggcctgcaattagcgcgttaatcacgtctctatcgatacgatcggacatgcttgtcttcctgttttattgtgtcaccccatccaattggatttttgacttctggttgtgacatttttttgacctgaacggcgcagcactctgtgcatcctctctgcgtcgtcctcacttcaggtaaggctgtgaatactcatgtattcagccacccttaaagaatagccaatgctctatttaactcccggtaaatcatgaaacatctgcgcttactcctgtattacgcactaacaggggcggcatcgcgccccagatttaatgaataaagattacgccagttgacgaagcatccgacgcagcggctccgcggccccccacagcagctggtcgcccacggtaaaggcactcaggaactctggtcccatattcagcttacgcaggcggcctaccggcgtggtcagcgtgccggtaacggcagctggggttagctcacgcatagtgatttcccgatcgttcggaacgactttcgcccacggattgtgcgcagccagcagttcttccacggtcggaatagacacatcttttttcaatttaatagtgaatgcctggctgtggcagcgcaatgccccgacacgcacacataaaccatctaccggaattacggaagatgtgttgaggatcttgttggtttccgcctgccctttccactcttcgcggctctgaccgttatcgagctgtttgtcgatccacggaatcaggctacccgccagcggcacgccaaagttatccaccggcagctcaccgctacgggttaaggttgtgactttgcgttcgatatcgagaatagcagaggacggggtcgcgagttcatctgccacatggccatacagatggcccatctgggttaataactcacgcatatgtcgcgcaccaccgccggaagcggcctggtaggttgcaacggacacccaatcaacaagatcattggcgaataaaccacccaagctcatcaacatcaggcttacggtacagttaccgccaacaaaagtcctgatgccattatttaatccgtcggtaatgacgtcctgattgacggggtcaagaatgatgatggcgtcatctttcatgcgcagagagcttgctgcgtcaatccagtaaccttgccatccgctttcacgaagctttggatagatttcgttggtataatcgccgccctgacaggtcacaatgatatcgagggcctttagcgcctccagatcaaaggcatcctgaagtgtgccagtggttccgccaaaagacggcgcagcctggccaagctgagaagtagaaaagaagacagggcgaatggcgtcgaagtcgcgctcttcaaccatgcgttgcatgagaacggagccgaccataccgcgccagccgataaaaccaacatttttcataagcgtttttttcctgcaaagatgtgtgctgtataaatgtgccggtctcctcttggcacatctttcaccatacaaaaagcagccaaagtcgcaagtgaaattaatcaatgatagcgaagccatcagtaatgcgacttatcctgctttgttagcacgcagaaagtccgcggcaattatcagggaatttgagttatgaatgaaatcatttctgcagcagttttattgatcctgattatggatccgctcggaaacctacctattttcatgtccgtactgaaacatactgaaccgaaaagacggcgggcaatcatggtgcgagagttgcttattgctctcctggtgatgctggtgttcctgtttgcgggtgagaaaattctggcatttcttagcctacgagcagaaaccgtctccatttctggcggcatcattctgtttctgatcgccattaaaatgattttccccagcgctagtggaaatagcagcgggcttccggcaggtgaagagccatttatcgtgccgttggcaattccgttagtcgccgggccgactattctcgccacgctgatgttgttgtctcatcagtacccgaatcagatggggcatctggtgattgctctgctgctggcctggggcggcacctttgtcatcctgctacagtctagcctatttttacgtctgctgggcgagaaaggggtgaacgcacttgaacgcctgatgggattgattctggtgatgatggcaacccagatgttcctcgacggcattcgaatgtggatgaaggggtaacgaggagagtttttcgaaaagaacccggtagcgtcacaactaccgggcgaacaaacttaactcaacagctggaacgcaatcatcccaacgatggcaccgacagtgccgaggatggtttccatcatggtccaggttttcagcgtttcggcttcggtcgcgccggtaaatttaccgaacaaccagaaaccggcgtcgttaacgtggctgacaacaatgctaccaccagcgatacaaatgctcagcgccgccatttgcgcaccggagtagttcagttgttcaataaccggcatcaccagtcctaccgccgttaaacaggctacggtggcagaaccctgaatgatgcgcactgcagctgccagcacgaagcaggtgatagcaatcggcaggcccatgccggttaacgcttcgcccagtgccggacctacgccagagtcaaccagcacctgtttgaacacgccgcccgcaccaatcaccagcagaatgatccccgccggttgcagcgcgtgaccgcaaatctccatcactttgtcttttggcatgccctgacgcattgccagaccgtaaatcgccaccagacaagcaaccagaatcgcggtaaacggatgaccgataaactcaaaccattcgtaagcagtacttccttccggcacaaaacgcgcggcaatggttttcagccctaccagcaccagcggcagcaggatcaggctcaggctgaatccgaaagatggcattttgccttcgccgagatgcggttcgctgatgtcgtcaggaatatgcagctcaacgtaacggctgatgaagttaccccacagcggcccggcaataatcattcccggaattgccgcacacaggccaatcaggatcatccagccaaagtcggcattcatctggcttgccagcagcatcggcgctggtccaggcaccagaaatgccgccgctgccgccacgcctgcaaataatgggattaccagcttcaccaggttcgtaccggtgtggcgcgccatactgaaagcaacgctaatcagcagaactatcgccacttcaaagaacagcggtagcgcacagaccagccccgcaaggccgatggcataatgcgcgcggctgtgaccgaaggatttgagcattttgacggcaatctgatcgactgcgccggtttcatgtaagatcttgccaaacatagctcccagggcgacaaccaccgccaggaagccgagggtgcctcccatccctttttccatcgtcgctgcgattttatcgagcggcataccagaaaaaaggccagcccccatggacaccaccattaaagccaggaaagcgtgcatacgcgccttcatgactaaaaacagcagcagtaaaacagaccctactgctgttaaaacaagcgttaatgtagtcactacttatttgccttttttaataacctcaatggtgcttgccacaacaccttccagcggttgatcgatatccaccaccagtacatcggtttcgtccgcacccggctcctgcagcgtttcaaactgcgtcaccaacatttgggttttaaagaaatggcctttgcgcgctttcaggcggatttcaatcacatcaaaatcgcctttcaaatagatgaaagagagattcggattaccttcacgcagcaagtcgcgatagtgttttttcaatgcagaacagacgatcaggctcactttattagtgcgctgcatagcaaacgcggcgtcgttcagcgcctgcaaccacggtttgcgatcgtcgtcattcagtggttcgccagacgccattttttcgatattgcgccgtggatggaggaaatcgccatcaagaaacgcggcatgaagttgatgcgccacttcactggcgaccgcagatttgccgctgccgcttacgcccatcaagacgtaaatgtggtgatcatggttagtcgtgctcaaagtggtgcccccacaatacaagaattaaaaatgttacgggtaactgttatcggtaacattgtccagccggacaatatcagaagcaatatccatccatgccttaagtgtataagtgtgagctacttcaaatttgtgggcttaaatagatccgcccggactcaaggtgaaacctaaatctaacattttcggtgtcacagattcgccacgaatacgcgccagcaggcgttcagcgccaatactgcccatccgctcacgcggcgtcagcacgctcgcaagtcgtggctccatcacctgaccaatgtcatgaccgtggaaaccggcaatcgccatatcgtcaggaacttttaaccccagacgctgacattcaaacgccgcgccgaccgccaggtcatcattcgtacagaacacgccatccagctgcggatattcccgccgcgcctggcgaatcagttcaataccggaagagtaagaagaagattgctcaaccatcacgctatatggcaccaggcctgcatccagcatcgcctgttcgtatcccttctgtttgatgatagtacgttcgtcgagacgtgcgccgagataggcaatgtggcgatgcccgcgagcaataatggcagtggtcatctggcgtgctgcttcaaagttatcaaaaccgacggcgatatcaaggcatgggctcttgctgtccatcagttccaccacgggaatacccgccacttcaatcatctttaaggtgcgcggcgtgtgggtacgttcggtgaggatcaggccgtcgatattccaggagagcatggattcgaggcgttcttgctccatttccggtttataaccgtagtgcgccagcatggtctgataaccgtgcgcgtcggtgacgctttcgattccgcgtaatacttccgcgaaaacctggttggtgagagaaggtaacaggacgccaatcgcccggctggtggcgttagagaggatatcgggcgcacgattgggaatatagcccagttcatcaagagccgcggcaatcttgccgcgtagagcgacggaaacctgctccgggttgcgtaaaaaacggctgaccgtcattttggtcacgcctacacggtcagccacatcctgaagtacgggtcttttctttttcatcgtcctgaaggtacaaaagagatagattctcttagtttaacacggacacatcagaaccttcccggggaaaacagtgcttgtttacaattattagatatacactaaatcaattgcatcgcattgtgctaacgacgcggcaaaaccccggaagcgtacatcagcacgcgaccggagcgagcgaggaagcctgcaaaaaggcaggcttcaaagatgccgttgagttttaaaccggcggcagatcgaacagtaacacttcgctgtcgctatccgcatggatggagattgcctgctcatcccagattgccagaccatcgctggtgctggctttcacgccgttaatggtgacattgcctttcaccacctggatccagacgcggcgttcagcggcaatctgatgcacgctctgctcatctttcagcaacgcccagcggtacagttccatatcctgatgcactttcaaactaccatctcgcgcatccgggctgagcaccagctgtttgccctgtacggcatcgaagcgacgctgttcataacgcggcgtaataccgttttcttcaggcatgatccagatctgatacagatgcagacgctcggtgctgcttgggttgtactcactgtgacgaatacccgtaccagcactcataatctggaactcacccgccggaacctgctctttattgcccatgctgtcctgatgctcaacagtaccttccagcacgtaggtcaaaatttccatatctttatgcgggtgagtgccgaagccctgccctgcttcaatcacgtcgtcgttaatcacgcgcagcgcggagaagcccataaagttcggatcgtaatagttggcaaaagagaaagtatgccaggagtccagccagccatgatttgcatgaccacgttcatttgctttgcgtaagtagatcatttgtattcgccccctgaatgatttcgatgggcttagtgtggacccgatctgcctgggatgatagagggtgaaaattgacccctctgttcaaaaaaattgaactattcgaggggccatcaaacttacttagcgagagttactgtggagggagaggcttgctcaaatccgcgttcaaggatttccagattggtaagaacttcagattccttgacgtaatttggcgcaccgtgggtgatggtttgatacaacgcatcataaacgcgcccgtaatcgcccatctccggcttcatctcttctctgaccgtcacgccctcgtcattgacatactccagcacaccgacgctatcatccgctgcgaatcccggttcgcccggcataatattagccttcaggctggtttcctgctggtcgataccgtatttaataaagctacctttcttaccgtgaacgataaatttcggataatcgattttcaccagatggctggttttgacgatggctttcaggtcgccataaaacagttgcgcttcaaaggtgtcgtcaggattggctttattacgcaggctgcggatgtcataagcgacgtgatccgggcgaccgaacagagaaataatctggtccatcgtatgcacaccaaggccataaaacgcgccatcctgcggcagcccaggtttggtttctgccaccgggcggtaatagtcaaaatggctttccacttcaacaatctctcccaacttgccactttcaatcgcttttttcgctgtcaggaagcaggagtcaaagcgacgattctgatacggcgtgacggtcagccctttgcttttcgccaacgcaaacagctctttcgcctgcgcaagtgtcggagtgaacggtttttcgaccagcacatttttcccggcttccagcgcgcgtttcgcgtactcgaaatggctgtccgcgtgggtgcagacaacaaccagcttaacatcgggatcgtttagtacttcgtcgagatcgctggtgaaatggatatgggaataaatgggagcctgttcttccggcttcgcatggcgacgaaaaatatgcgcgacatgccagctatccttgcggttaagtacatacggcagatggtaacgggtggtgcttttgccgaagccaataaaggcgcagttgatgaccatgatttcgtcctttttaaggtggttatttacaccttagcgcaaagcggacgtggttcctactggagtgcgcataacgaacacaagcactcccgtggataaattgagaacgaaagatcaaaaaaaaagccagcacccggctggctaagtaatactggaagcaatgtgagcaatgtcgtgctttcaggttctccgcgagggtcttcctgatcgcgagacaataataatcattctcattcgcacttgtccaacactttttgcaaaaaaatgcatttgactcgcatttgaaagtcaatgatgttgaaagggacatttaccccaaagaggacaaaggaacaaatgctcttcccacgaagagggccgctaaccttagtaccccgccgttaaatcatccacgctgcgcgggtcggatgcgccgtacaactcaccgtccggcccaaccataatgctttgtgtactgcccatcgcctctttcagcgccactttctgaccttttgcttccagcagcttgagcgtatccgggctaaaccctttttcgacacgcagctcgtccggcaaccactgatggtggaaacgcggcgcattggtcgcttcggcgacgttcaagccataatcgatgctattcaccaccatttgcagcactgtagtgatgatccggctaccgcctgggctaccggtaaccagccaggttttaccgtctttcaccacaatggtcgggctcatgctgctcagcgggcgtttgttcggcccgacggcgttggcatcaccgcccaccagcccgtaaacgttcggtacgcccggtttggcggagaaatcatccatctggttattaagcagaataccgctctcgcccgcgacaatgcccgtaccgaaggtggtgttcagcgtataggtcaccgccaccgcgttaccatctttatccaccacactgtaatgggtagtttgattactctcataaggcgcaagcttgccggggcgaatttcgctggatggcttcgctttattgatatcaatttgatcggcaatagatttggcataggctttattggtcagcgcctgccacggtactttgacaaaatccgggtcgccaagatattcgctgcggtcggcgtaggcgtatttctccgcttctgccatgatttgcatcgcatcggcgctgccaaagccgtatttcttcatatcgaagttttccagaatattgaggatttgtacgatatggatcccgccggaggatggcggtggcatggagtaaacctgatacccgcgataatcgccgcttatcggagtgcgttcgaccgctttataggctgctaaatcttctttagtgatcaagccaccgtttttctgcatctcctgggcgatctgttccgcaatcgtgcctttatagaattcgtccgggccgttttcagcaatcatctccaggctctttgccaggttcgcctgcaccagcgtgtcgccctttttcagcggctcgccctctttccagaagatagctttactgttttcgtgattcggcaacacttcgctaccgtaggttttgagatcgtcagccagcgcgtcgttaacgataaaaccatcgcgtgccagtttaaacgcgggctgcacgactttgttcagcggcatggtgccgtatttatccagcgccaggctgaaacctgctaccgtacccggtgtgccggaagccagatggctagtgagactttttttgctgtccgggttgccctgatcatcgaggaacatatcgcgggtcgctttggcgggtgccatttcgcggaaatcgatagccgtggtattgccatttttgctgcggattaacataaaaccaccaccgcccagattccctgcctgcggatgcgttaccgccagcgcgtagcccaccgccacggcggcatcaacggcattcccgccctccttgagaatatccacccccacctgagtggcagtggcgtccacagacgctaccattccctgtttcgcgcgtaccgggtggaagacatcttcctccacaccatagctgacgggcggcgcaggaggcgcggcggcggcgctaaaacaacttccactgagcagagcagcaatggccacccggcgtaaaaacgtcggttttatcatcgttattctccagagattaaggggcaaccccagctaagcctggtatataactctgaattaatcatcgttttgtcgggaagcgagtaaacttaaaggatatcttcagaggaggatacgcgatgaaacgacttctgattcttacggcactcctgccgtttgtcggctttgcacagcccattaatactctgaacaaccctaaccagccggggtatcagatacccagccagcagcggatgcaaacccagatgcagactcagcaaatccagcaaaaagggatgctgaatcagcaactgaaaacgcaaactcagttgcaacagcagcatttagaaaaccagataaacaataattctcagcgggtgttgcagagtcagccgggggagcgaaatcccgcccggcagcaaatgctgcccaacaccaacggcgggatgttaaacagcaaccgtaatccggatagtagcttgaatcagcagcatatgctgccggagaggagaaacggcgacatgctgaatcagcccagcacgccgcagcctgacattccgttgaaaactattgggccgtaattattgggccgtaaagttcggaccaatcacgtcaatcgcatcggtacagatgcaatccacaccccagcgcagcaactctgctgcgcgctggggtttattgacggtataaaccagaatccgcagtccggcgtctttcaactgcatcactcgcgctttattgagtaacttatgattgagatgaatagagacgcagcccagccgcgcggtcagttcgcgccagtcgtcgcgccactcatccagcaacaaaccgcgcggcagttccggtgccgcctgttgtgcagcttctaaagcatcaatctcaaagctactcagcagcggcggcgtcataccggcccacagctcgcgtgccgccagcgccaccattttgcccgttaatggcccggtgccggtggtgggtttgatttcgatattcgccatcatcccgtgttcgcggcaacgttccgccacctggctaagcaacggtagcggctcacctttaaacattttgctgtaccaactgcccgcatccacgcgcagtaaatcctgccagttcagttcacccgcgacgccccagccgttgctggtacgttcgagattgtcgtcatggagcaggaagatctcgccatctttgcttaacttcgcgtcaaattcgatcatcttatgaccgtattttgccccgacgtcgatactcgccagggtgttttccggggccagcttaccgccgccacgatgagcgacgatgcggggataaggccagttactcatactcgttgtcctgtttcaccatcaaaaagatgcagctgattttccgccagatgcagccacagcgtgctgcctgccgtcgggcgctcctgatgcgccagtcgcaccaccagcttctgctcgccccagcgtccgtgcgccaggttatctgcgccgaggatctccagcgtgtccatcaccatcggtacgccgccttctgcctggctgcttagcgcaatatgttccgggcgaatgccgagagtcattttacgcccggcatactgacggtagccaccgtttagcggcagctcaataccgccgtccagttcgaaatgcgtgccttcgttattcacgcggcctgtcagcaggttcatcgccggactgccgataaaactcgctacaaacaggctggcgggcttttcgtagacttcaactggtgtgccaatctgttcggcaacaccgccgttcatcaccattactcgctgggcgagcgtcatcgcttcaacctgatcgtgagtaacgtagagactagtcgttttcaggcgacggtgcaactgttgcagttcaagacgcatctgcacgcgcagcttggcatcgaggttagagagcggctcatcaaacaggaacaccgccggatcgcgcacaatcgcgcggcccatcgccacacgctggcgctgaccgccggaaagctcgcgcgggcgacgtttgagcagaccgtccagctccagaatgcgcgccgcttctttaacgcgctcggcaatttgctgcttgcccatgccgcgaattttcagcccccacgccatgttttcttcgacactcatatgcggataaagcgcgtagttctggaacaccatcgcaatcccgcgatcttttggctccatttcagtcacgcgctggtcgttgatccagatatcgccttctgtcacccgctccagcccggcaaccatgcgcagcagcgtgcttttcccgcagccagacggcccgaccatcacgataaattcgccatccgccacatcaagggtcagcggtttaatgacctgggttttaccatcccagcttttggttactgcctgtaatttcagtcctgccatcttatttctcactatcgaccaggccgcgcacgaaggcacgctgcatcactaaaacaatcaccaccggagggataagcgttaacaacatcgccaccatcacactgttccattccgtggtgccttcgcctgtagcgatcatccctttgatccctgccacggtggtgccgagatccacatcggtaataatcaacaacggccacaaatactgattccagccgtagataaaggtgatcacaaacagcgccgccagattagttttggagagcggaaaaacgatgtcgcaaaagaagcgcattgggcttgcgccgtcgatccgcgcggcttccaccagctcatccggcagcgtcataaagaactggcggaacaggaaagtagcggtcgcgctggccatcagcggcagcgttaaaccggcgtagctgtcgagcatctgcaggttggcgatgacttccaccgtcgggaagatacgtacttcaaccggcagcatcagggtgataaaaatcatccagaagaagaggttacgtagcggaaaacgaaaccagacaatggcaaatgcgctgagcatgctgacggtaattttgccgagcgtaatgctgaacgccatcacaaagctgttaagcaacatccgccagaacggcgcgctattcgtgcctaccccgttcacccagatgttgtggatgttttccagcagatgtgtgccggggatgagcgtcatcggcgcggcatagacggcctgtttatccagcgtcgccgcgacaaacgccacgtacagcgggaagaggatcaccgcgatcccgaggatcagcatggtatggctgaatatcgtcagccacggacggttctcaatcattggtaacgcaccttgctttcaacatagcggaactgcaccaccgtcagcacgatgacgaggaacatcaacaccacgctctgtgcggcagagctagccagatccagtccggtaaaaccttcgcggtagatcttataaatcagcgtcgtggtggcctgaaccggcccgccggacgtggcggcgtcgatcaccgggaaggtgtcgaagaaggcatacaccaggttcactaccagcaggaagaaactcaccggggcgataagcggcagcgcaatcttaaagaagcggcgaatcggccctgcaccgtcgatggctgcggcttcgatcaagctacggggaatggattgcagcgcggcatagaagaacaggaagttgtagctgatttgcttccatacactggcaaacaccaccagaaacattgcctgaccgctgttttgcgcgtggttccagtcgtagccgaactccgcgagaaaatgggtgatcagcccgcgaccggggttaaacaggaagatccacaatacggcggcaacggcgggagccacggcgtaaggcagcaacattaaggtttgatagaaacggctgccgcgcacgatgtactccaccagcgccgcaaagaacaggcttaccagcaaaccgctgacggtgacaaaggtgctgaattttatcgtcgtccagaaggagtcgagatagtagctgtcatggaacagcgtgacgaagttatccaggccgacaaactggctggagaaaccaaacggatcgacgctttgtaggctgtaccacaacgcttcgcccgcaggccagataaaaaagataacggtgatgatgagctgcggcgcgaccagcagataaggcagccagcggctgcggaacaccggacgggaactactcattacggttaattcctgaactgtgccggatgcgcttcgcttatccggcctacacgcgatgccaggtcagataagcgaaacgcatccgacattacactgattaagacttcgtgcttttctcaaagcggcgcagcaactgatttccacgctcaacggcggtatccagtgcctgctgtggtgtcttcttaccggtccacacgctctccagctcttcatccacaatcacgcggatctgcggcatgttgcccagacgcagccctttggtgaacggcaacggcggcttattcagcatctgacgcgtcgcggtatccgcccctgggtttttctcataaaagccctgctcacgggtcaggtcatacgctgctttggtgattggcagataaccggttttctgatgccactcggcagcgttttctggcttcgcgaggaaatcgaggaacttcgccacaccggtatacgtttctttatctttaccctgcatcacccacaggctggctccgccgataatggcgttttgtggcgcatctttcgcatcggcgtcgtaaggcatcatgcctacgccgtagttaaatttggcgtactcgcgaatgttggcaagagaaccggaagaggcggtggtcatcgcgcaatcaccgttatagaacttctcggtggattcatccttacgaccgacgtagctgaagtcgcccttcttgttcatctcctcgagcatggcgatgtgtttcacctgctccggcttattgaactccagcaccgcgtccgtgccgtcaaagccgttgtttttgctggcaaacggcagaccgttccaggcgctaaagttttccagttggatccagccctgccagccgctggcgtagccgcacttcatgccggaggctttcagtttcgcggcatagtccgccagatcctgccaggttttcggcggctgttccgggtctaatcctgctttcttgaaggcgtctttgttgtaatagagaacgggggtgctgctgttgaatggctgggagagtaagtggcccgttttgctgtcggagtagtaaccactaaccgtcggcacaaactggctctcatcgaactgaatccctgcctctttaaacacgtcatacaccggtttaatggctttgctcgccatcatggtggcggtgccaacttcataaacctgcaaaatagccggcgcgttgccggtacgaaatgcggcaatccccgcgcttaaattctgttcgtagttgcctttataggtcggtacaattttgtaatccgggttttcggcgttaaaacgttgggccagagaatccacctctttacccagttccccttccatagaatgccagaacggaatggtcgtcactgcctgtgcattccccattaacgccagtccgagcgccagtgcactagctgtataatgtaacggtttcatcgtttatctctcttgttgtaccgaatgcgcgaattcacgcgttttatgctcgcggggtaacatgacatgctcgaattacagaaaaataacttttttgttacatttgtaagatagtaaggtgtcagaaagatgacaaggcggtgacggcgtgggtgagggaaaatgggagatggggcacggataagcgggaaaatatagaaggtctgaatcaaactctacagattgctcatcgtttcatgccggatgcggcgtaaacgccttatcaggcctacaagatcgtgcaaattcaacatattgccactcacccagtaggcctgataagcgcagcgcatcaggcaattttacatttgtcacctgtctcaaaggagtcttttgactccctatcaatcaacgtgttattacccgcctaaatacgcacttctcaccgcttcattcgccagcagcgcatcaccagtatcggaaagcactacatggccgttttccagcacgtagccgcgatccgccagctttagcgcctggttggcgttctgctcgacgagaaagatagtcatcccctgctcgcgcagctgctcgatggtgtcgaaaatttgctggatgataatcggcgcaagaccgaggcttggctcatcaagcagtagcaaacgcgggttgctcatcagcgcacgaccaatcgccagcatctgctgttcaccgccggacatggtgcccgcccgctgaatacggcgctcatgcagacgtggaaacagctcatacacccactttatgcgctcctggaactggtcgcgttcagcaaaaaaaccgcccatcgccaggttctcttccaccgtcatccggctgaagacgcgacgcccttccgggacaatcgccaccgcttcgcgcatgattttcgctgtctgccagtcggtaatgtctttatcatcaaacacaattcgcccgctggtggcacgcggatcgccgcataacgtgccgagcaaggtggttttccccgccccgttcgcgccaatcagcgtgacaatctcgccctgattgatatgcaggctcacctcatgcagcgcctggattttgccgtagtgggcgctgactttgtcaaaggacaacatgactttttccatcttatgcctcacctaaataggcacggatcacgtccgggttattacggatctgctccggcgtaccgtttgccagcggcgtcccctgattgaccacgtaaattcggtcgctaattcccatcaccagcttcatatcgtgttcaatcaacaagatagtggtgttgtgatgattgcgcagttcggcaatcagctcatccagctctttcgtctctttcgggttaagacctgccgcaggttcgtcgagcattaaaatctccggctgcgtcaccatgcagcgggcaatctcaagacggcgctggtcaccataggccaggttactcgcctgacggttggcgtgttccagcaaaccaatgcgctcaagccaggtcgcggcgcggtcgagcgcttcgctctgggcgcgacggaaggatggcgttttcaacaggccagagaacagcccggttttcagttgctgatgctgcgccaccagcaggttttcaattaccgtcatttcacggaacagacgcacatgctggaaggtgcgcaccacgcccatgcgggcaatttgctgccccggtaaaccttccaggtgctgatcgcgcagtaaaatggtgccgccggtgggtttgtagaatccggtcagacagttaaaaaccgtggtttttccggcaccgttagggccgattaagctgacgatctcctgcgggtacagttcaagattgacgttgttcaccgccagcaggccgccgaagcgcatcatcaggccgttaacagataataatggctgactcatgcctgctctcctttcgctgcgccgtttttcagcttcagttgcgggcgcgtcatgggcagcaagccctgcggacgccagatcatcatcagcaccatcaaaccaccgagcattaacatgctgtattcgttgaaatcacgcatcaactcgcggctcaccaccagcaaaattgccgccagaatcaccgcaaattggctgcccataccgccgagcaccactatcgccagcacaaacgcgctttcggcaaaggtgaaggattccgggctgacaaagccctgacgcgccgcaaacagcgttccggcaaaaccggcaaacgcggcacttatggtaaaggcagtcagcttgatacgacgcgggcttaagcccaggctacggcaggcgatttcatcttcacgcaacgcttcccacgcacgccccagcggcatccgcagcaggcggttaatgacaaacaggcttagcaccaccagcagcaacgccaccaggtagaggaagatgacacgatcggagggatcgtatttcaggccaaagaaattactgaacgtgtcccagccgccttcacgagcggtacggctgaactcgagtccgaagagtgtcggtttcgggatctgactgattccgttcgggccgccggtaatttcggtgttattgagcagcaatatgcgcacaatttcgccgaaaccgagggtaacgatcgccagatagtcaccgcgcaaacgcagcaccggaaaaccgagcaggaagcccgccgccgctgccattaatccagcaatcggcaggcaggtccagaagcccaagccgtaatagtgattgagcagcgcaaaagtgtaagcgccgatggcgtaaaaaccgccgtaccccagcaccagcagaccagaaagaccaacaaccacgttcagcccgagaccgaggataatgtagatcatggtcagggtggcaatatccaccgtcccgcgactaaccataaacggccacgccaccgcaagcaccaacagcgccacgaggaacagtttctgcttcaccgtggagccatcaatggcgggcagaataaacttcggtccggaaacgcttttcaaccctttctggaaagccggtcgcaaaagctggaagaaaaagaccaccgccgtgccgataaacacccactgccaacggacatcgctagccgtgtcgaccaccagtttggtgccatccagctccagttgcacgcccataaagacgcccgccagcacaaagaacatcgcggcagagagcagcgccattgcaatatgcatcggtttcatactttctctacctccgggcgacccagaataccggtcggcatcaccagcagcaccagaatcagcagggcgaaactgaccacatctttatattccgtactcagataggcagaagagagcgcctccgcaatccccagaatcaggccgccaatcatcgctcccggaatgctgccaatcccaccgagcaccgccgcggtaaaggctttcatcccggccataaagccgatgtaggggttaatgacgccgtagaactgaccgagcagcacacccgccaccgccgccatcgccgcgccaatcacaaaggtcagcgcaatcacccggtcggtgttaatgccaagcagactcgccattttcagatcttccgcgcaggcacgacacgcgcgacccatgcgggaatagcgaatgaaaatcgtcagcgccagcatggcgaggaaggtaacaatccagatcaccgcctgcatggtggtaatagaggcagagaagttttcgctatgccccaccacccactgaccgttaaacaggctcggcagcgccacgtcgcggctaccttcggtcaggctgacgtagttttgcaggaagatggacataccgattgcagagatgagtgcaatcaggcgcttagagttacgcaccgggcggtaagccacccgttcgatactccagccgtaggcgctggcaatgacgattgcgccgacgaatcccgcagctaccagcagccagccggtatcaatgcccatcatcatcagcgcggcgatgatcataaaactgacgtagctgccaatcatataaacctcgccgtgggcgaagttgatcatgccgataatgccgtaaaccatggtgtagccgatggctatcagcgcgtaggtactgcccagcgtgacgccgttaaacatctgctgcaagaaatacaaaaactgctcagacataaggtaacctttctaaacccgcccgcattttacgggcggtgggatgatcacttggctgccgtggaactaccgtcggcgtgccactggaagacaccaaaatcaaatcccttaagatcgcctttttcatcccagttcagcggcccaatcacggtgtttgcaccgttagcttttaaatctttcaccagcgccagcggctcatcgctgccggtacgctcaagggcagtcgccagagattgcaccgccgcgtaggtgatccagacataaggcccggacggatctttcttgtctgctttcagcgcatcaacgatgccctggtttgccggatcctggtcatagcgttttggcatagtgaccaacatgccttcggcggcatcaccggcaatgttgctcaagctcgcattacccacaccttccggccccataaactgggttttcaggccaacggaacgggcctggcgcagcatctgccccatttccgggtagtaaccgccgtagtaaacgaagtcgatgttttcttttttcaggcgggcgatcagcgcggagaaatctttctccccggcggtaataccgtcgaagaagacgacgttggcgttagccgctttcagcccgtcctgcacgctacgcgccagcccttcgccatactgttgtttgtcgtgaatgatggcgatgcgctggggcttcaccgtctcaagaatgtattttgccgccgttggcccctgggaagagtccagcccggcagtacgcataatgtgttgataaccgcgttgggtcagctccgggttggtcgctcccgggctgatcatcagaataccttcgtcttcatagatatcactcgcaggctgggtagaagaagaacacagatgaccaataacgtatttaatgccgtcattaacgattttgttggcgaccgcaacggcttgtttcgggtcgcatgcgtcgtcatattccacgccaaccagtttatcgcccttaattccccctttggcattaatgtctttaattgcctgacgcgcgccgttaaattccatatcgccccactgggcaatcgggccggacatcgcgccgacaacggcgactttaatatcgtcagccatagcggtgtgactaattgccagtgcaatcatccctgcgatgatagttttcgcattccgtttcatagtcaaaaatccccattcgtgatgttgtgttgctttgtttttatgtgttaacaaatcagactgttctttttttatactgcactgtttttgcctgtctgattaaggggttagcgcagtattttgtgataatagcgattaaaatccctatttttcagtcgattaagaacagataatattctgaatttattgatagataaacagaaaaaagtgcctttgtcagcataaaataacggcacaaagggcggaataattcactatcattcaggggattatgctggacatttttcattctctaatgttttaattttgtaattattgctgttaaaaaattaatcacctgccaaaagaaataaaaaagagaaagcctccgattaaattatttcgctacactggttccacttttgtgatttacacgggttacccatgaagctgaccatcattcgattagaaaaatttagcgaccaagaccggattgacctgcaaaagatctggccggagtattccccttccagcttacaggttgacgataaccaccgtatctacgccgcgcgttttaacgagcgcctgctcgctgccgtgcgggtaaccttaagcggcaccgagggagcactggattccctgcgcgtgcgggaagtcacccgccgtcgcggtgtggggcaatatctgctggaagaggttttgcgtaacaatcctggcgttagttgctggtggatggcggatgcaggcgtggaagatcgcggtgtgatgacggcgtttatgcaggcgctggggtttacggcacaacagggcggctgggagaagtgttaatcgtcaagtttgatttcaaaagtgatattgcctgatgcgctacgcttatcaggcctacaatgtgtgttgcaatttactgatttctttggatcttgtaggccggataaggcgtttacgccgcatccggcatgaagcaacgtactcgatattagcaatttggcggcaacccaaagttgccgattaatgattacttcgcatcggtcgccgtgccgttggcgtgccagtcaaatacgccgaactcaaagcctttcagatcgcctttctcatcccaggtcagcggtcccattacggtatccacggagttcgctttcaggtatttggcgatttcagccggatcgtcagactgattcaggcccgcctgcaaagattgcagcgcggcgtaggtggtccaaacgaatgcgccacttgggtcctgttttttcgctttgatcgcgtcaacaatgggtttgttcgccggaacctgatcgtagttcttcggcttggtcaccagcagcccttccgcactttcgcccgcaatgttagacaggctaacgttagccacaccttccggccccataaactgagttttcagccctgccgcgcgtgcctgacgcaggatttgccccatttccgggtgataaccgccgtagtaaacgaagtcgatattctcttttttcagacgcgccaccagcgtactgaaatctttttccccggcggtgatgccatcaaagaacaccacgtttgcattgcctttcttcaggccgtcctgcaccgctcgcgccagaccttcgccgtattgctgtttgtcgtgaacgatagcaatacgctgcggtttcactttctcaagaatatatttcgccgccgtcggcccctggtcggagtccaggccggtggtgcgcaggatcagctgatagccacgggcggtcagctccggcgcggttgccgctggggtgatcattaaaatgccttcgtcttcgtagatgtcagacgcaggctgcgtactactagaacagaggtgaccaatcacatatttaatgccgtcgttaacgactttgttcgccaccgcaaccgcctgtttcgggtcacaggcatcgtcatattttacgatttgcagtttgttgcctttaatgccgcctttagcgttgatatccgcaaccgcctgctctgcgccggtaaactcctggtcaccgtactgcgcaaccggaccggacattgcgcccacgaccgcgactttaatatcttctgccagagccatattgctgaatgccagcgcgatacatcctgccagtaacgctttaccctttatgttcatcctgagaatccccattcttctggttattacgtgtgttgtgatgttgtttttcagcactttatttcgttttatgcatgactacccgtgctttagcagcatactctgctaaaacatacccgatttttatgatattggaatagctattttgacagtttattaacaatctgcgtggggattggcgttttgccggaggggaaattgattattacagaggcccaaaaaacaaaaaccccggactctcatccagggttctctgcttaatagcggaaattacgcttcaatggcagcacgcaattttttcatcgcgttcttttccagctggcgtacacgctcagcggaaacgccgtaacggtcagccagttcctgcaacgtggacttgttgtcttcgtccagccagcgcgcacggatgatgtcctggctgcgttcgtccagaccctgcatcgcgtcggtcagacggtttgccgcctgctcttcccagttatcatcttcaatgccgtcggcaaagttagaacttttatcctgcagatagagcaccggagccatcggctggctgtcggaatcgtcgtcggaagacaggtcaaaggtcatgtcctgtgccgccatacgactttccatctcacgtacgtctttgctggttacgcccagttcacgggccaccatttcgacttcatcctggttaaaccagcccagacgctgcttggttttacgcaggttgaagaacagtttgcgctgcgctttggtggtcgcaactttgacgatacgccagttacgcagaacgtattcgtggatctctgctttgatccagtgaacggcgaaggagaccaggcgcacacccacttccgggttgaaacggcgcactgctttcatcaggccgatgttaccttcctgaatcaaatccgcctgtggcaggccatagcccgcataattacgagcaatatgaacaacaaaccgcaggtgagacaggatcagcgttttagctgcttccagatcgccatggtaatgcagcttttcagccagcgcccgctcctcgtcagcgctcaacatcggccacgcgttagctgcccggatgtaggaatccaggttgccaactggggctaaagctaaactttgcattttgtcagtcattcaaatcctctcaatcgatatcttctggcgcttcagtggtagcaacaactgtgccagagcttaagagcaacgaggttatcattcactgttttatcagaccgtgattttatccacaagttcaatgcaagcttgtgaataaattacgcacaaaatgtgacatagagatgaaataccgggaagagacaacggggtctctttccctgctacggaacccattgcagggaaagagtataacacgcttttattattcaggcgtaaagtggcgtaaatgttgtaccgtggcaagccacgctgccacccagccaatcatgctgcataccagcagcaatagcaggcattcatcgaaacttaagccattgatatcaaacttcgttccgaaaacctgtgccacttccgcaaccgcgctactcaatcgcagcaccagaatttcactcaaaattaaactcaacaatgcgccagaaaatcccagcagtgcgccaccatacaggaacgggcgcaggatgaatccatctgtcgcaccaatcagtttctgtacgttaatggagtcacggcgagcaaagatactcagacgcacactgttaccgatgacgaggaacacggccgccaccatcaacacgccgatcatcgcgctaacgcgcccgaccagcccggtcaacgccgccagacgggcaaaccagctgtcatccatccgcacttcgtcaatgccgttaatctgcgtgatacgatcacgcagcgtattcagactttccgtcccctggaaatcgagtttcgggatcaccaccgccactgccggaagcgggttttcttccagcatatccagcgcaccaccaaaaccagaccagttacggaactcacccagtgcgtcttcacgagaaagatagttcactttctccacgccttgctcggcctgcaactgtgccaccacgcccgcagcagcgtcatcgtccagcgttttttgcagataaacagtgatttgcggactcggataatactgcgtcgccgcctggttaacgtttttgtacaccatataacagacgctgggcagcgtcagagaaatggcgataaccatcaccgttaaaaacgtggcgaacggtttgcttttcagatcctgcaatgcgccgtggaaggcatagcgcacctgttcgttgaaaacgttggttttgcgatttaccggttttgggctggatttcgcgcgttttggtgcgttacgaccgccgtcgccactgccgccgacgcttttacggaagcgatcaagacgcccgccaaactgccgaatatgattgattgcatcgcgcttattcatggcccacgcctccatgcaagtgaccatcgctcagggtgagcatgcgataggaacgccggctgatcaggttgatgtcgtgcgttgccatcaatacggttaccccaacgcggttaaactcttcaaacagacgtaaaatgccttcgctcagcgcgtcgtccaggttaccagtcggttcgtccgccagcagtaccgcgggcttgttcaccaccgcgcgggcaatgccaacacgctgttgttcaccgccgctaagctgaatagggaagttcttcgctttgtccagtagcccgactttatccagcgccgcgctcacccggcgacgaatatcgtcaccgctggcaccggcgataatcagcgggatcgccacgttatcgtagacagtacggtccatcagtagatggtgatcctggaaaatcatgccaatctggcggcgcagaaacggaacttcacggtttttcagacgcgtgatgtcatggccgctaaaccagattttcccggcgctgggccgctcaatcccacagatcagcttcaggagggtacttttccctgcgccggaatgaccggtcagaaacgccatctcacccggctgcatatggaacgtaacgccctgcagcgcctgtctcccaccgagataagccttgctgacatgttcaaagcgaatcattgttaatcctctcgggcaaaaagtgcctctataaagtcgtccgccttaaacggacgcaaatcctcaatacgttcgccgacaccaatgtagcggatagggataccaaactggtcagccacgctgaaaattaccccgcctttcgccgtgccgtccagtttcgttagcgtgatgccggttaagccaacggcttcatggaacagtttggcctggcttaccgcgttctgcccggtgctggcatcaatagtcagcataacttcatgcggcgcttcaacgtcgagtttcttcatcacgcggacgattttcttcaactcttccatcaggtggcttttgttctgcaggcgtccggctgtatcggcaatcaggacgtcgatattacgcgctttagctgcctgaatggcgtcgaagataacagaggcggaatccgccccggtatgctgggcaatcaccggaatattgttgcgctgaccccagacctgaagctgttcaaccgcagctgcacggaaagtatcacccgccgccagcatcacgcttttaccctgctgctcaaactgacgcgccagcttaccaatcgtcgtggttttacccacaccgttgacgcccaccatcaggatcacaaacggcgctttgccttcaacattcagcggctcatcgactttcgccagaatctcgcccatctcttctttcagcaggccatagagcgcctcggcgtcacgaagctgcttgcgggatgcgccttccgtcagattggtgataattttacgtgtggtttccacacccacatcggcgatcaaaagctgctcttccagctcctcaaacagatcatcgtcgatttttttaccgcggaacaggctgataaatccggaaccgagattttctttggtttttaacaggctgcgtttcaggcgcgcgaaaaaaccttctttggtcggtttttcctgctcctgagcgatttcttccaccggctgctcttcttctgccggaggaaccaccatcaccgcctcttctgccgcttcggcagccagcgccgtttccagctcttcgtcggtaatttcttctttagccgcttcttcttccgccgcttcgacaatctctacggtttccgcttcagcctgccactcttctgggctaaccgcttcggcgttgacgtcttccggcaacggcagctcttcacgttcgatagccactggctccggcgtttcttctacgaccggttccggctgtgcaacgacttccgcttcaggctgcgctttttcactttcagcaacctgttcagtgacttccacaacgtcggcagcaaaagtttccgcctcggcttcagtatgcgcttgcggctgctcttcaacggcttgttcagaggccttcacaggctcttgcgcctgaacgatttcttctacaaccggttgttcattctgaacttctgtctctttttccggggtctgctctttttgaccaaagcccagccaggaaaaaaagccacgttttttttctttcgccatttgcgactacactcctcgctgttgcttcatggcacagcgttaacgctatgtacatagcagctaaaaaaatgatgaaatagtctatcacttaacttaattcacatcaccgcctgcaagtatgtgttatctggcggattgagcaatttatcatgaaaaaaccgaatcattccggcagcggccaaatccgcattattggcgggcagtggcgaggccgtaaactcccggttcctgatagcccaggtctgcgccccaccaccgaccgcgtacgcgaaacgttgtttaactggctggctccggtcattgttgacgcccaatgtctggattgcttcgccgggagcggcgcgctggggctggaagcgttaagccgctacgctgcgggggcaacgttgattgagatggatcgcgcggtttctcagcagttaattaagaatctggcgacactaaaagcaggcaatgcacgcgtggtgaacagcaacgcgatgagtttcctggcgcaaaaaggtacaccgcataatatcgtgtttgtcgatccaccgttccgccgtggcttgttagaagagacgataaatttactggaagataacggctggctggctgacgaagccctgatttatgtcgaaagcgaagtcgaaaacggtctgcccactgttccagcaaactggagtttacatcgggaaaaagtggcgggtcaggtggcttatcggctgtatcaacgcgaagcacaaggagaaagtgatgctgattaatattggtcgtttgttaatgctctgcgtttggggatttttaatcctcaacctggtgcatcccttcccacgcccgctgaatatcttcgttaacgtggcgctgatttttaccgtgctgatgcatggtatgcagctggcgctattgaaatccactttaccgaaagatggcccgcagatgaccaccgccgaaaaggtacggattttccttttcggcgtgtttgaactgctggcctggcagaagaaatttaaagttaaaaaataaccttattgttcgcctacaaagctgacaaagcgcgttcctttatagctcagcgtacctttatcgcccactgtcagggcgtggtactgctgggcgtcgaggcgaaacgtctgctccattcctccgctttgcggtttgaagcttgcctcatagcgtatactggtgcctgccggagtcacttcctgctggcggctacggcgatcgttaatcggtttttcccgcttgttgctcaccaccaccagcttttgctggagcggagccatatcattatcagctttttcccgtcgctgttgcataaaacgaaagcttgcggcgacgacaattaagccaatgataacaataaagaaaagaggtggtttgctcatctttatccctcatcggaaaatgcggaaataagcataccctgccagttatggtgttgtcatccgtccaccctcgccactaaactggaagcaagaccgtaggcattccgcttacgaaaaaataacgaattcaaggaactaagatgctttggagctttatcgctgtctgtctttccgcatggctatctgtggatgcaagctatcgtgggccaacctggcaacgctgggtgtttaaaccgttaacccttcttctcctgctgttactggcctggcaagcgccgatgttcgacgccattagctatctggtgctggcagggctgtgcgccagtctgctgggcgatgcgctaaccctgttgccacgtcaacgtctgatgtacgccatcggcgcgtttttcctcagccacctgctgtacaccatctatttcgccagtcagatgacgctctctttcttctggcctctaccactggtgctgctggttctgggtgcgctgttactggcgattatctggacgcgcctggaagagtaccgttggcctatctgcacgtttatcggcatgacgctggtgatggtgtggctggcaggtgaactgtggttcttccgtccgaccgctccggcgctctctgcgtttgttggcgctagcttgctgtttatcagtaactttgtctggctggggagccactatcgccgacgcttccgtgcggataacgcgattgctgcggcctgctactttgccggtcacttcctgatcgtccgcagcctgtatctctgataaaacttgactctggagtcgactccagagtgtatccttcggttaatgagaaaaaacttaaccggaggatgccatgagcactcctgacaatcacggcaagaaagcccctcaatttgctgcgttcaaaccgctaaccacggtacagaacgccaacgactgttgctgcgacggcgcatgttccagcacgccaactctctctgaaaacgtctccggcacccgctatagctggaaagtcagcggcatggactgcgccgcctgtgcgcgcaaggtagaaaatgccgtgcgccagcttgcaggcgtgaatcaggtgcaggtgttgttcgccaccgaaaaactggtggtcgatgccgacaatgacattcgtgcacaagttgaatctgcgctgcaaaaagcaggctattccctgcgcgatgaacaggccgccgaagaaccgcaagcaagtcgcctgaaagagaatctgccgctgattacgctaatcgtgatgatggcaatcagctggggtctggagcagttcaatcatccgttcgggcaactggcgtttatcgcgaccacgctggttgggctgtacccgattgctcgtcaggcattacggttgatcaaatccggcagctacttcgccattgaaaccttaatgagcgtagccgctattggtgcactgtttattggcgcaacggctgaagctgcgatggtgttgctgctgtttttgattggtgaacgactggaaggctgggccgccagccgcgcgcgtcagggcgttagcgcgttaatggcgctgaaaccagaaaccgccacgcgcctgcgtaagggtgagcgggaagaggtggcgattaacagcctgcgccctggcgatgtgattgaagtcgccgcaggtgggcgtttgcctgccgacggtaaactgctcagtccgtttgccagttttgatgaaagcgccctgaccggcgaatccattccggtggagcgcgcaacgggcgataaagtccctgctggtgccaccagcgtagaccgtctggtgacgttggaagtgctgagtgaaccgggagccagcgccattgaccggattctgaaactgatcgaagaagccgaagagcgtcgcgctcccattgagcggtttatcgaccgtttcagccgtatctatacgcccgcgattatggccgtcgctctgctggtgacgctggtgccaccgctgctgtttgccgccagctggcaggagtggatttataaagggctgacgctgctgctgattggctgcccgtgtgcgttagttatcagtacgcctgcggcgattacctccgggctggcggcggcagcgcgtcgtggggcgttgattaaaggcggagcggcgctggaacagctgggtcgtgttactcaggtggcgtttgataaaaccggtacgctgaccgtcggtaaaccgcgcgttaccgcgattcatccggcaacgggtattagtgaatctgaactgctgacactggcggcggcggtcgagcaaggcgcgacgcatccactggcgcaagccatcgtacgcgaagcacaggttgctgaactcgccattcccaccgccgaaagtcagcgggcgctggtcgggtctggcattgaagcgcaggttaacggtgagcgcgtattgatttgcgctgccgggaaacatcccgctgatgcatttactggtttaattaacgaactggaaagcgccgggcaaacggtagtgctggtagtacgtaacgatgacgtgcttggtgtcattgcgttacaggataccctgcgcgccgatgctgcaactgccatcagtgaactgaacgcgctgggcgtcaaaggggtgatcctcaccggcgataatccacgcgcagcggcggcaattgccggggagctggggctggagtttaaagcgggcctgttgccggaagataaagtcaaagcggtgaccgagctgaatcaacatgcgccgctggcgatggtcggtgacggtattaacgacgcgccagcgatgaaagctgccgccatcgggattgcaatgggtagcggcacagacgtggcgctggaaaccgccgacgcagcattaacccataaccacctgcgcggcctggtgcaaatgattgaactggcacgcgccactcacgccaatatccgccagaacatcactattgcgctggggctgaaagggatcttcctcgtcaccacgctgttagggatgaccgggttgtggctggcagtgctggcagatacgggggcgacggtgctggtgacagcgaatgcgttaagattgttgcgcaggagataaggcaaaccgatcgcaacattgagcgcgatcggtcccctcgcccctctggggagagggttagggtgaggggaaaaggcggcatcgaagccaatcagcccctatcaaccgcctttacgaatcaaataacgataaggcagtccatccgtctctttagcaaccagttcgtgttccataaaggtacaaaacccaggaatatcgcgggtagtggccggatcgtcggcgataatcagcaacgtttcgccaggctgcatattgcgcacggttttgcgcaccatcatcaccggttccgggcagcgcaggccaagcgcgtcgagtgtgtggtcagggctggaaaagagatcggtcattttcttctcatcacttaaaaaaacggcgctagtttacgccctgtgagtccgtaagcaaactaggttaacgattgcgtgaaaattaaccattgcattgtcaacgtaaagcagtatcatgcggcggctcgaaaaaagggtaagcacgttattatgttaaggtaacagacgtgtcgtacgtattgggttccctcaccccaatggttaatcaaaaaggtacaatatgaacgttttcagccaaactcaacgctataaggcgttgttctggttaagcttatttcatctgctggtgatcacctccagtaactatctggttcagcttcccgtctccattttgggtttccataccacctggggcgcgtttagctttccgtttatttttcttgctaccgacctgaccgtgcgtatttttggcgcaccgctggcccgacgcattatcttcgcggtaatgatccctgcgttattaatctcctacgtcatcagcagcctattctatatgggttcctggcagggattcggcgcactcgcccacttcaacctgtttgtcgcccgtatcgccaccgccagtttcatggcctacgcgctggggcaaatcctcgacgtgcacgtttttaaccgcctgcgtcagagtcgccgctggtggctggcaccgacagcgtccacactgttcggtaacgtcagcgacacgctggcctttttcttcattgccttctggcgtagcccggatgcctttatggctgaacactggatggaaatcgcgctggtcgattactgtttcaaagtgttaatcagtatcgttttcttcctgccaatgtatggcgtattactcaatatgctgttgaaaagactggcagataaatccgaaatcaacgctttgcaggcgagttaaaggttcgttatcagagttgtgataagatggatgaatgagccgttatggccgtttatcgaaaggaagaagtcaatgcgcaatctggttaaatatgtcggaattggcctgctggttatggggcttgcggcctgtgatgataaagacactaacgctacggcgcagggtagcgtcgcggaaagtaacgctaccgggaatcccgtcaacctgcttgatggcaagttaagtttcagcctgccagcggatatgaccgaccagagcggtaagctgggaacgcaggccaataacatgcatgtctggtccgacgccaccgggcagaaagcagtcatcgtcatcatgggcgatgatccgaaagaagatctggcggtgctggcgaagcgtctggaagatcagcaacgtagccgcgatccgcagctgcaagtggtaaccaataaagccattgagctgaaaggtcacaaaatgcagcagttagacagtattatctccgcgaaaggccagacggcgtactcttccgttattctgggtaacgtgggtaatcaactgctgaccatgcaaattacgctgcccgctgacgatcagcaaaaagcgcagaccaccgcagaaaacatcattaatacgctggttattcagtaagttttaagaactactggcggcctcagggacgtgttccggaggccgtttttttaatcgccacgtcagtaataacgcgattgcgaccagtcccgccgccgccagataaatcaccggtacgcccgcccagctcatcaccagcccagccagtggtccagtcacgccaaggcttaaatccataaatacggtgtaagttgccagcgccgccccctgattttgctgcggaaccgcttttaccgccactacacccaatgccgggaacaccaggctaaacccggcccccgccagtaagacgccgattttcgccatccacggcatagtcgccacgccaaccagtagcaggccgattatctcaacgctaaagcaaatcatcgctacgtttaagccaccgatacggttaatgccgttagggaataacaaacgcgtaccgacaaacgcacagctaaacagcgtcagcgcgaaagccgcaccgtcccaacctttagcgtcataaaacagcgtgataaaggtggcgatgacgccaaatccggcggaagccagtgccagcgccataccgtacagccagacgcgcccaagcaccgcgcgaaacggcagcggtttgcctttactggcttttaccgtcggacgcgggatcgccaacaaaatggccaccagcgccacgcccataatgattaacgctaacgcctgcaagccgccccagtgataaaacacgacgcctaacggcgcacccatcgccatcgccccgtaagtgacaatgccgttccagctaatcacccgcccgatatgcaggctgccaaccacgccaacgccccatagggtgcttcccgttccggcaaaactttgcccaatcccaaggatgacgcgccccaggcaaagtaataacaggctgatgacaggcagactggcggttaatcctgccgtcagataccccagaccgctcaaaaagcagccgcataaaccgaagacgacaatctttttgggtcccaggctatcggcgtaacgtccggcatgagggcggctcagcaaggtggcgaaatattgcaggctgataaccaatcctgcccagaaggcgctaaagcccatcacatcatggacatagcccggtaatacagcgagcggcaacccgatggtgaggtagctggcgaagttaaacatgactatagagacaatgcgcaaattcaggcgcaatccgtttagcgcgggttcggctacgggttcgggcatgaggatcaccacatttttacaacagtgtttcatttttaccacgtgctgacgtgaaaatcagcagtaagaatcagaatattgctggcgtgactcccgctacacttaatacaaaaagtcacaaggaagccccaatggaaacccctcaacccgataaaacgggcatgcacattctgctcaagctggccagcctggtagtgatcctcgcgggcattcacgcagcggcagatatcattgtgcagctgttactggcgctgttttttgccatcgtcctcaacccgctcgtcacctggtttattcgtcggggagtacaacgccccgttgccattacgattgtagtggtggtgatgctgatcgcactaaccgcgctggtcggcgtactggcggcaagctttaacgaatttatctctatgctgccgaagtttaataaggagctgacgcgcaaactttttaaattgcaggagatgttgccttttcttaatttgcatatgagcccggagcgaatgctgcagcggatggacagcgaaaaagtggttaccttcaccacagcgctaatgaccgggctttccggggcaatggcgagcgtgcttttgctggtgatgaccgtagtttttatgctgtttgaagtgcgccacgtcccttacaaaatgcgttttgcgctgaataatccacagattcacatcgcgggattacaccgcgcacttaaaggcgttagccactatcttgcattgaagacgctactcagtttatggacaggtgtcatcgtctggctggggctggagctgatgggggtgcagtttgcgctgatgtgggcagtactggcgtttttgctcaactacgtgcccaatatcggcgcggtaatttccgccgtaccgccaatgattcaggtgctgctgtttaatggtgtttacgaatgtattctggtcggcgcattgtttttagtggtccatatggtcatcggcaatattttagaaccacggatgatgggccatcgcctggggatgtccaccatggtggtatttcttagtttgttaatttggggatggctgctcggcccggtagggatgctacttagcgtgccattaaccagcgtgtgtaaaatctggatggaaaccaccaaaggcggtagcaaactggcgattttactggggccgggcagaccgaaaagtcggttaccgggatgaggcgacaagtgatacgatacgcactttcattttccattaaacgttggccctgatatgtatcggatagttctggggaaagttagcaccttaagcgcagctccactgccaccgggtttacgcgagcaagcaccgcaaggtccacgacgcgaacgctggctggcggggcgtgcattgcttagccacacgctttccccgctaccggagatcatctatggcgaacaaggcaaacctgcatttgcgccggaaatgccgctatggttcaacttaagccatagcggtgacgatatcgccctgctgttgagtgatgaaggcgaagtcggctgcgatatcgaagtgattcgcccgcgcgccaactggcgctggctggcgaacgccgtattcagcctcggggaacacgctgagatggacgccgtgcatcctgatcagcaactggaaatgttctggcgcatctggacgcgcaaagaagccatcgttaaacagcgtggcggcagcgcctggcaaatcgtcagcgtagacagcacctatcactccagcctgagtgtcagccattgtcagcttgaaaatttaagccttgcgatctgcacccctactccctttacgctcaccgccgacagtgtgcaatggatcgatagtgttaactgatccgcccacccgactgcccatctattgatccagaacaggtaatcagtatgacgaatacttaaaatcgtcatacttatttccgccatctattttaatccattggggttaccatgctctccacactccgccgcactctatttgcgctgctggcttgtgcgtcttttatcgtccatgccgctgcaccagatgaaatcaccaccgcctggccggtgaatgtcgggccactaaacccgcacctttacacgcctaaccagatgttcgcccagagcatggtttatgaaccattggtgaaatatcaggcagacggtagcgtgatcccgtggctggcaaaaagctggactcatagtgaagatggtaaaacctggaccttcaccctgcgtgatgacgtgaaattctccaacggtgaaccgttcgatgccgaggcggcggcagaaaacttccgcgcagtgctcgataaccgtcaacgtcacgcctggctggagctggcaaaccagattgttgatgttaaagcactcagtaaaacagagctgcaaattaccctgaaaagcgcctactatcctttcctgcaagaactggccctgccccgtcctttccgttttatcgctcccagccagtttaaaaaccatgaaaccatgaacggaattaaagcgccgattggcaccggaccgtggattttgcaggaaagcaaactgaatcagtacgatgtcttcgtccgtaacgaaaactactggggcgaaaagccagcgattaaaaagatcacctttaacgtcatcccggacccgactacccgcgcggtggcgtttgaaactggcgatatcgacctgctgtacggaaacgaagggttattaccgctcgataccttcgcccgctttagccagaatccggcttaccacacccaactgagtcagccgatcgaaaccgtgatgctggcgctcaataccgccaaagcccccaccaacgagctggcagtacgtgaagctcttaattacgcggtaaacaaaaaaagcctgattgataacgcgttgtatggcacccagcaggtcgccgacaccctgtttgccccttctgtgccctacgccaacctcggcctgaaaccgagccagtacgatccgcaaaaagcgaaagcgttgctggaaaaagccggttggacgctgcctgcgggcaaagacatccgcgagaaaaatggtcagccgctgcgcattgaacttagcttcatcggcaccgatgcgttaagcaaaagcatggcggaaatcattcaggctgatatgcgccagattggcgcagatgtcagcctgattggcgaagaagagagcagtatctatgctcgtcagcgcgacggtcgttttggcatgattttccaccgcacctggggcgcgccatatgatccacacgccttcctcagtagtatgcgcgtaccgagtcacgctgacttccaggcacagcaaggattagccgacaaaccgctgattgataaagagatcggcgaagtgctggcgacccatgacgaaacgcaacgtcaggcgctgtatcgcgacattctgacccgtctgcatgacgaggcggtttatctgcctatcagttacatcagtatgatggtggtaagtaaaccggagctgggtaacatcccctacgcgccgatcgccaccgaaattccgttcgaacagattaaaccggtgaaaccttaatgttgcgttacgtattacgccgctttctgctgctgatcccgatggtgctcgccgccagcgtgatcatttttctgatgctgcgcctcggtaccggcgacccggcgctcgattatttgcgtctgtctaacctgccgccgacgccggagatgctggcctctacccgcaccatgctgggactggatcagccgctgtacgtccagtacggcacctggttgtggaaggcgctgcatcttgactttggtatcagtttcgccagccaacgcccggtactggacgatatgctgaacttcctgcccgccacgctggaacttgcaggtgcggcgctggtattaattctgctcacttccgtaccgctcggtatctgggcggcgcgccatcgcgaccgtctgccggatttcgccgtacgtttcatcgcgtttcttggcgtgagcatgcctaacttctggctggcgtttttactggtgatggcgtttagcgtgtatctgcaatggctacccgcgatgggttacggcggctggcagcacatcattttgcctgcggtttccattgcctttatgagcctggcgattaacgcgcgtttactgcgcgccagtatgctggacgtcgccggtcagcgtcacgtcacctgggcgcgtctgcgcggcctgaacgacaaacagaccgaacgtcgccacatcctgcgcaatgccagcctgccgatgatcaccgccgtggggatgcatatcggcgaactgattggcgggacgatgattatcgaaaacatctttgcctggccgggcgtcgggcgctatgcggtgagcgcgatttttaaccgtgactatccggtgatccagtgctttacgctgatgatggtggtggtttttgtggtctgtaatttgattgtcgatttgctcaacgccgcgctggacccgcgcattcgtcgtcatgaaggagcgcacgcgtgaactttttcctctcttcccgctggagcgtacgcctggcgctgatcattatcgccctgctggcgctgattgcgctcaccagccagtggtggctgccgtatgacccacaggcgattgatttgccgagccgcctgcttagcccggatgcgcagcactggctgggcaccgatcacttaggtcgcgatattttcagccggctgatggcagcgacccgcgtgagcctcggtagcgtaatggcctgcctgctgctggtgctgacattagggctggttattggcggcagcgccgggttgattggcgggcgcgttgatcaggccaccatgcgcgtcgccgatatgtttatgaccttcccgaccagcattctgagcttctttatggttggcgtgctcggcaccgggctgaccaacgtaattatcgccatcgccctgagccactgggcgtggtatgcacgcatggtgcgcagcctggtgattagtctacgccaacgcgagtttgtgctggcgagtcggctttccggtgcgggccatgtgcgggtgtttgtcgatcatctggcaggcgcggtgatccctagcctgctggtgctggcaacgctggatatcggccatatgatgctgcacgtcgcggggatgtctttccttggcctcggtgtgaccgcgccgaccgccgaatggggcgtgatgattaacgacgcgcgccagtatatctggacccagccgctgcaaatgttctggccggggctggcgctgtttatcagcgtgatggcctttaacctggtgggtgacgcactgcgcgatcatctggaccctcatctggtgacggagcacgcacactaatgccgcaacagattgaactacgtaatatcgcgctacaggccgcgcagccgctggtacacggtgtaagcttaaccctgcaacgcgggcgcgtgctggcgttagtcggcggtagcggcagcgggaaaagtttaacctgcgccgcaacgctgggcattttgcccgctggcgttcgccagacggcgggggaaattttagccgatggcaaaccggttagcccttgcgccctgcgcggcatcaaaattgccaccatcatgcagaacccgcgcagcgcctttaatccactgcacaccatgcacacccacgcgcgggaaacctgcctggcgttagggaaacccgccgatgacgctacgcttaccgctgccatagaagcggtggggctggaaaacgccgcgcgcgtgctgaagctgtacccgttcgagatgagcggcggcatgttgcagcgcatgatgattgcgatggcggtgctgtgtgaaagtccgtttatcatcgccgatgaaccgaccaccgaccttgacgtggtagcacaggcgcgcatcctcgatctgctggaaagcattatgcaaaaacaagcgccgggaatgctgctggtgacccatgatatgggcgttgtggcgcgtctggcggatgacgtggcggtgatgtctgacggtaagattgtcgaacagggcgatgtagaaacgctgtttaacgcccccaaacatacagtgacgcgcagcctggtttccgctcatctcgccctctacggtatggagctggcaagttgacctaatacggtatggagctggcatcatgactttacttaacatctccggcctttcccatcactatgcgcacggtggatttaacggaaaacatcaacatcaggcggtgctgaataacgtttccctgaccctgaaaagcggcgaaaccgtcgccctgctggggcgcagcggctgcgggaaaagtaccctcgcgcggttgctggtgggtttagaaagccccgcgcaggggaatattagctggcgtggcgaaccgctggcgaaactcaatcgcgcccagcgtaaagcgttccgccgcgatattcagatggtatttcaggactccatcagcgccgtgaatccgcgcaaaaccgtgcgcgagatcctgcgtgaaccgatgcgccacctgctaagtctgaaaaaatccgaacaactggcgcgcgccagcgaaatgctgaaggcggtcgatctcgatgacagcgttctcgacaaacgcccaccgcagttaagcggcggccagctccagcgcgtctgcctggctcgcgcgctggcggtcgaaccgaaactactgattctggatgaagccgtttctaaccttgatctcgtgttacaggcgggtgtcattcgcctgctgaaaaagctacaacaacagtttggcaccgcctgcctgttcatcacccacgacttacgcctggtagaacgcttttgccagcgggtaatggttatggacaacggacaaatcgtcgaaacccaggtggtgggagagaaattaaccttttcctctgacgccggacgtgtgctacaaaacgcggtattacccgcattccccgtgcgccgtcgcaccacagaaaaggtttaacgcaaatgcaacgagtcaccatcacgcttgatgacgatttactggagacgctggacagcctgagccagcgtcgtggttataacaaccgttccgaagctatccgcgacattctgcgtagcgccctggcgcaagaggccacccagcagcacggcacgcaaggtttcgcggtgctgagctatgtgtatgaacacgaaaaacgcgacttagccagccgcattgtctccacccagcatcatcaccacgacctctccgtcgccacgctgcatgtgcacatcaaccacgacgactgtctggaaatcgccgtgttgaaaggtgacatgggtgacgtgcagcattttgccgatgacgttatcgcccagcgcggcgtgcggcacgggcatttgcagtgcttgccgaaggaagattgagttacgccattgtcccaatcgtcttcctgaatcgcagcagcgcaatggtgaaaaatgcgccgccaattgccatcagcgtcagaaactgcggccagacgatttcgaatccggcaccccggtagaggatggcctgcgcgaggctaacaaagtgtgtcgtcggcatggtcagcataatgtcctgcaccatctgcggcatactttcgcgcggcgtggaaccaccggaaagcatttgcagcggcagcagcaccagaatcaccagcagccccagttgcggcatactacgcgctatcgtccccataaaaatgccgatactcgtggtggcaaacagactgagcgccacgcccagcataaacagcgggatgctgccttcaatcggtacgcccagtacacctttcaccatcagcaccaggcttaatccgcttaccaccagcaccaccagccccatgctccagatcttcgccatcatgatctcaaacggcgttatcggcatcaccagtaagtgttccaccgtgccgtgttcacgctcgcggatcagcgcgcttccggtcaatacaatcgccagcatggtaatgttgttgatgatcgccatcaccccgccaaaccacgcgggatcgaggttcgggttaaagcgcatccgggtttccaggcttaccaacggttcgctgttatcacggtagcgcgcgacaaagctgttcacttcaccgttgataatattctggatatacccattgccggtaaatgcctggctcatgcgcgtggcatcgacgttcacctgaatatccggctggcgtccggcgaggacatcacgctgaaaattaggcggaatatttatcgcgaaggtatagcgtccggcgtccagtccggcatccatctcatcggcggtgatcatctccggtggcaaaaaccacggacgatagaagctgttaacgatccggttgcttaactggctttgatccatatcggcaatggcgatcggcgcgaggttcaagcttcctggcgtaacggtcgcactgctatacacgctcaccgtaaagctgaagacaatcagcgtcagcatcgctttatcaccgagcagactgcgcaactctttgatacccagattaaaaatattgcgtaaatggcgcatcatccctcctgttttttcagcagcaggatacttaagcccatcaccagcgggatggctatcagtaacgggataaaaagttgccacaaatcagtcagatccagcgctttgctgaacgtcccgcgggcgatagtcagaaaatgactggtcgggtaaacctcgccgatccaacgtccaggcccttccaggctagctaccggatcgatcatcccggaaaactgtgtcgccgggatcaacgtgataatcgccgttccgaaaatggcggcaatctggcttttcataaaggtggagatcagcagccccattccggtggcaatgatgatatacagcagcgccgccagggtgagcgtcaggaaactgcctttatgcggtacgccaaacacaaacacgctcaggccgcagagcaggaaaaagttcagcatccccagcgcgatgtatggcaactgtttaccaagcaaaaattcactacgcgtggtgggggtcacgtaaaggttgataatgctcccaagctctttttcccgcaccacgctaagggcgcttagcatactcgggatcatcatcagcagaagcgggatcaccgccggaacaatcgctggcaggctttttacgtccgggttatagcgatagcgcgtctcaatattcatcagcccgctttggctggcgggtgtgctttgtcggctcgccacatcctgtaaccagctctggtgcatggcctgcacgtaaccttttaccgtttcagcacggctcggcatcgctccgtcgatccagacgccgagttccacaggcgtaccacgcgcgatatcgcgcccgaaattgggcgggatctcaatcgccaccgtgatatcgcccgcacgcatccgacgatcaagctcgtcataactggtgagcggcggctgttcgataaagtaacgggaaccggagaggttgagtgtccacgcctggctactgacggtctggtcgcggtcgagcaccgcaaagcgcaggttttccacatccatactgatgccgtaacccattatcagcatcaggatcaccgttcccatcagcgccagcgtgctacgtactggatcgcgtcgcagttccagcgcttcgcggcggctgtagctaaacagacggcgcaggctaaatccctgacgcggcgcgtgggtggtgtcgtgtaccacgggcggcgcttcggcttcgttgctctgccctgccgcttcctgcaaataggcgataaatgcctcttccagactggcggctccgcgtttctcaaccagttcctgcggtgtaccgctggcaagcacttttccggcgtgcatcagactgatgcggtcgcaacgttccgcttcgttcataaagtgggtggagatgaagatagtcactttgtcctggcggctgagatcgaccatcaactgccagaacatatccctcgccaccggatcgacaccagaagtaggctcatcgaggattaacatctccgggcgatgaatcaccgccaccgccaggctaagccgctggcgaatgccgagcggcaaactctccggcagaatatcttcaacgtcgttgagcttaaaacgctcgctcatttcagccactcttgcgggaatttccgcttccgggatgtgaaacaaacgggcatgtaactcaaggttttgccgcacggtgagttcgttatagaggctaaacgcctggctcatatagcccacccgacggcgggtatcgatatcttttggatcaaccggttgcccgaacagccacgcctcaccttcgctggcgggcagcagtccggtgagcattttcatggtggtggatttaccgcagccgttgctaccaagaaaaccaaaaatctccccgcgtggaatgcggaaattaacgtgatcaacggcaacgaaggaaccaaaacgcatggtcagatcgcgcgcttcgatggcaatctctgcgttttcaggttgatacggtgggatcactaccgcctgatgcgcctggcgttgcgcttgcggtaacagatttataaatgcttcttccagcgtagcgctttgcgtttgctgccgtagctcttcggcgctgccagttgccagcacttctccggcattcatcgctaccagccagtcgaagcgttcggcctcttccatataggcggtggcgaccagcacgctcatattgctctgccgctggcgaatactgtcgatcagatcccagaactgggagcgggagagcgggtcaacccccgttgttggctcatcaaggatcaacagttccgggtcgtggattaacgcgcagcacagcccaagtttttgcttcatcccgccggagagtttccctgccggacgatcgcgaaacggtgctaacccggtgctggtcagcagctcattgattcgcacttcccgctccgctttgtcgtgaccgaacaggcgagcgaaaaaatcgacgttttcatacacgctcaaggtgtggtagaggtttttgcccagcccctgcggcatccaggcgatgcgcgggcagacgtcgcggcgatgcttcgggtcgcgcatatcgccgcccagcaccatcacattgccctgttcaatgacgcgggcaccggaaatcaagctcaacaagctgctcttcccgacgccgtccgggccaatcagcccgaccatacagcgggccggaatatcgagagtgatattgttcagcgcaacggtttttccataatgctggctcacgcccgccagttgcgcgacaggcgggacgggaaccagttccagatgcgtcattgcggcaacctcaccacgaggtcgtcaggccacggaagttcttcattcacccgcacccacgctacgcccggcaaaccggttttgacatattccagatgctgctggagtaattccggtgggatacgcgctttgacgcggaacatcagtttcagccgttcatcgctggtttcgacggtttttggcgtgaactgggcgacactggcgacaaaactgatggttgcaggaatacgcagatctggcgcggcatcgaggatcagccgggcttcaccgcccagtttcagcgtgcccgcctgttcggttggcaggaagaaagtcatatagacgtcgctgagatcgaccatattcagcacccgaccgcctgccgccagcacttcgcctggctcggcaacccgatactgcacgcgtccgtcacgcggggctttcagttcgctgtcatcgatatctgcggcaatgcgccgttcagtggcttgtgccgcttcgacgcgggtttgcgcctgaatgatattggtgcgtgccgcttctatagccgctttagaagcgcttacctgagctttcgcgctttccagcgcagctcgggcgctctcagcggcggcgcgatcgtcatccagctgttgcgcagaaatagcccctcgttgggccagactacgggaacgcgtatgacgttttgctacggagtccagttctgcctggcgttgattaaccaggctctgtgcggcacgagtttcgctttgtcgttgctccagcaaagcctgcgcggcagcaacggcgctttgtgcctctttgatttgcgcgatggcttccagtcgctgttcctgcaacacgcgagtatccatcttcgccagcacttcaccttcgcgaacaaacttgccttctttcaccagaatggtgtcgatacgcccggcaattttgctggcaatatccacttccgtcgcttcaatgcgcccattactgacagcaaagccttccggcacacctgccgggcgcaacagccaccacgccacgatagccgccaccgccagtaacccgacaacccaccacgccagatggcgcttactcttatccataatcgacccgccataatccctgtaagcaaacgacgcgtgttacaactgccgccgaacgacgttcagcggattcttccatccgggataagaaggaaacggcaaatacgaccagcgcgcagagcattgagcgccaacggggaaggcttagtgaaaacgggtagtaatgttgtcatcatcagcattcctggccgtaaatgaaacacgcatactcataagtgtgatctataaaactggctgacaaaacggtatccatcctgttggatagcgtttcacgcctgttcagttgcaggaacagagcattcctttttacgttttatcaacagtctcaaccagatagtaacattaatattcatgttgtctatggttcagagctgtaacattgtgcgccttctaatcaaaggcataagtccatttctgtttttttcatgctggtaagacttccagggagtggttatctcaggccctgcaccagggttaatttggcaattatgcatgctgaacattcttccagcatgtttactgtcacgggcgttaagacctaaaactgtccccgtttcgcctatgcgttctcttccaccatttccgttatgtgcaacaacttgatttatacctaacatttgactacatgctaatagtgcttcaagtttaggtctgtaatctgtgctaacagaaaaataacgattaaaggatcgacaagagatagcccggctagttttaaactttttgccattaattatagcatgatgctttttattgataattgccgctaattcgaccggatcgagagcattggtcatttcatcaatagagactgttatcggtcctataatgtaacgttttcgctgatcatcaaaagttatcccatgatgatttgccattattttgtatttggggtcatagaaacatacaggataatcttttatcccagagtaggtatcctcatcgagtggtttcatacgcgtgaagttctgcatatagttaccattgcaattcgtttcatgatttccagctaatacatgaacattttcattgatactcattatgcgttttaacaaatcgatgataaattgatcaccacagatattgctaaatcgatcgccggtttggtcgcccagaaacgtacatggcgtcacagcgtctttattaataactaaataaggctgaagactttctaaaataatgtctcttctgttcaggatactgattattgtattaacattagtgttaagttgctcattaaagttctcccttagcaatacgttgagaacttcatcttctatattaagcaactggctaaggaaattttctccttcagccatgattcccaaatgtcccgttgcgaaaagcgcgaacaaaactgcaccgacactgccatcggtatcaccaaaataggttggtctggtacttgtgggatcaacgggtaaacaattggagaaatagattctgtcagcgaactggggttttatcattgtttcgaatttaatatcagatacattatattggcttattttccagttccagatgggtttgtagctctcagtaactgcaacatcattagcattatcatttactgtcatattattaagtaaataaacaatactgcaccaattaatatcggtattatcaagagagcaaccgtaatttttgctattaattgtcacaataaactgataattattattcctacgtagaatatgagcacgcatgccgcttagcatactatatttttcactatgatccgtttgtatggtaaaactaattttgtcatcttgaatagattgttggaaccgttctatttgccaatcatctattttttccacaacctcaccgagcattgtcctggcaatactacttatatcatcacctataccatttgcaatatacccaaacagttctttagtgaagttggtaacatgctcttgcaccatatcatttgttgcgattgtcgttgtactgtcgttagtgcctgccacagttccaattttcatattttacctcatattatttaccgcgaggaatacatagttaacattttatcttatgacatacacctcatgttcgatgggaaaataattatattttgcacaaatcattcagcctcaaagcataatatgaaatttcttatctcatagcagagaaagtccctaaagattgtagaggcgtcatcagaacatgcctctacaatcgattaagaaaacctatgaaatactggcaggattaaaaagacataccaccgtattcatggagttttaatgtagttgaaaacaactaagcccactggaataaattattttattatttttatcacgtgcttccttcagggaatttagccccataataccattatcaaattgttgattatgatctaccccgggcccatgatgcccatatttttgtctaatgtatttgctggggtcttcacctttgagtgtctccccacatatgaagatacgttcacgtgctggtctgaaatcagtagtgttatcaaaataattagcatatacaggtgtgggtttcaaagtattgcttcggattagatggaatagaggatcatccatgtgttctttatgttttttattaaaaatattggctaattcctcaggatcagtaggatttttcatctgattaaatggaacctgcaaagcacgctgacaataacatttttttcttcatctcttattattccgtgatgactggttaaaacttgcctttcactgtcataattacaaacatcgagcgttttaattaagttatacgtatcaccggcagagagtttatgatttgctagtcgtgcagtatagttaccattaaaattgatttcatgatttccagccagaacgacgacatttttattaatacggctatctttattaccctccatatttcgcatagaatttagcaaagtaaggatatatttatcaccaaaaatagtactaaatctatcgcctgtatgatccccaaggaagatacaaggggttatcgcatcgtcctttaaaaaaacatgttgatgcaactcattcaagatcatgtctctcgtatttaataaatcgtagagcactttattatttttatgtttgtatgcagaactagccatctcttcgtgttttaataattcacataataaactccaacccttttccctgatgcctatatgcccactaacgagcaatgcataaagtacagcgcctactcttccatctgtatcgccaaaataagccgtgttggcattttgtgggttaatcacaccacactgtttatagaagtctattttactaaacacagatttaacatagctatcaaacttttccttagtaaacgtctctttagagacatcccaacgccagtcaggtttgaaattaccactaagaagagtaaagaaatttctcgctatgatagaaagcccatcaactttataaattatatcacttttatctccagaggaattaataaaataataaccgcccttacactcaacagtaacggtaatgggagagcttaattttaacacatggttattgtctggtataattgtaaagataaacgtatcagtagtattgtcggcgaatctattatattcttgaatatctatagaaggttcactattataaaaccatactttctccatctggtgactacgatcatttaccttccagtgaccatgttgcaggaaatagatgatatgcaggccaaaatcgttatctatttggctatcattatccagtttatcaaattcaactatctttgcacgatgtgttttatcaaccttgccatggtgttgatgactgttaactttatcactatgcttatcttgatggctactagagatgtttctaatctgattgtcaattgctttcataaataacctgtgatatttttgaattgtttgtaacaaaataaatgatacttgtctgaaaaacagatttacgacgatataaaataataatacttatatgttcgctgattttaagcaccgagactatccggtcttttaccaaataatgaagaataatccctccctggaagataattgtaaaaaacaacagcataagaattaatcttaggataaatttttatttatcatggccttttgaacgctgaaaagtagcgctctgcaaagtaaaccccgctatagttatgctatgcatttgtctttaatgatatctcgtcattatattaacaggatgaaattatcattaatgcatatttcaatattagcagggatacctgaggagtttaaagtgaacatatatatcgggtggcttttcaaattaatccctttgattatgggcttaatttgtatcgcgttaggtggctttgtgctggaaagtagtgggcaaagcgagtatttcgtcgcgggtcatgtgctgatttctctggcggccatatgcctggcattattcactaccgcatttattatcattagccagctcacgcgcggcgttaatacgttttacaatacattgttccccattattggctatgcggggagtattatcaccatgatatggggttgggcactgttagcaggcaatgatgtgatggcagacgagtttgtcgccggccatgttattttcggcgttggtatgattgccgcctgtgtaagcacggtggcagcgagttccggtcactttctgctcattcccaaaaatgcagcggggagcaagagcgacggaacaccggtacaggcttattctagtttaatcggtaactgcctcattgccgttcccgttttactcaccctgctcggtttcatttggtctattacgctgttacgtagtgctgacataactccgcattatgtcgcgggtcacgtattgcttgggttaaccgcaatctgtgcctgtctaattggccttgttgccacaattgtccatcaaacacgtaatacgtttagtactaaagaacactggctgtggtgttattgggttatttttctcggcagtatcacggtactgcaggggatatacgtcttagtcagttccgatgcaagcgcccgactggctcccggcattattcttatttgcctcggaatgatctgttacagcatattcagtaaagtctggctactggcactggtatggagacgtacctgtagcttagccaacagaataccgatgattcccgtcttcacctgcctgttttgccttttcctggcaagctttcttgcggaaatggcgcagaccgacatgggatattttattcctagccgagttctggtcggtttgggagcggtatgctttacgttgttcagtatcgttagtatattagaagcgggttctgctaaaaaataattgcaacgtaccggataaaaccagcgttgaccatttgcgtaacgctggtttttcttaggcatcatgaaataacgcagcattaatgcatagtggttaagtataaaaaacagcaaagttactgtttttttcaacctgttcatatttcataaagatctggccactgagtgagttttcaatcacctttccatccaccttatattaagcatggagggtttcagttcacgggctcattagaaaataatcacaagataaccactatcaaaattagctcatttttaatgcgactctaataattttcatctttaggaaataggtcaggagctctttgctgcaatcaaatcctgcgcacaagcccacgcactgctccacgcccactggaagttatagccccccagccagccggtgacgtccatcacttcgccgatgaagtacagcccaggcactttgcgcgcttccatcgtccgactagagagttcgttggtgtccacgccgccgagcgtcacttcggcagtgcgatagccttcagtgccgttgggttgtacgcgccagtcggtcaatgtgctaatcagtgcctgttggtcacgcacgttgagctgttttaggctaacatccgggatttgcccgagttgctgtaagcgttcaaccaaccgcttcggtagatgaaccgccagtgtgtttttcaggctttgattcggatgtgcgttacgctgctcattcaggaaggtttcgaggtccacatccggtagcagattgatgctgacaaattcccccggttgccagtagctactaatctgcaacaccgccggtccagacaagccgcggtgggtgaagagtaagttctcacggaaaacggtgccgttttcagcggtaatcacggaaggcaccgccacgcccgccagcacctgtaactcttcgagcaacggtttatgcagagtgaatggcaccagacccgcgcgggtcggcagcacgttgaggccaaattgttcggcaatcttataaccaaacgggctcgcgcccagccccggcatactcagcccaccagtcgcgatgaccagcttttcgcaaccgacagtcatgccgttcagatcaagcgtgaagcctgtttcatccttcgccacactcagcacttcgctacgcaatctgaaggtcacattgcccttctcgcactcatccaccagcatgtcgacaatctgctgcgcggagtcatcgcagaagagttgccctaacgttttctcgtgccaggcgatgccgtgtttattgaccagatcaatgaaatcccactgggtaaaacgtgcgagtgcagacttacaaaaatgcggattctggctcagataagcgcctggttcgacataaaggttggtaaagttgcagcgcccaccgccagacataaggattttgcgccctggttttttaccattatcgatcagcagaacccggcgtcctgcctgacctgccagcgcagaacagaacatacccgccgcaccagcgcctataataatggcatcaaacctttccacgttgcgctcctcttagaaaaaacgggcgtgaattgtaaagattcctcagtggtcgcaccagcatcaatattactaaaaggaagtatttgcctgaattatataagataattattttttgagtgaaatccatacagggggcaaatcaaaaaaagtctatatttcactttgcccgcgccgcgaaagtcactgataatgcgccgcgttcatgtcctcaaaatggcgtaacgtcctatgctacatttgtttgctggcctggatttgcataccgggctgttattattgcttgcactggcttttgtgctgttctacgaagccatcaatggtttccatgacacagccaacgccgtggcaaccgttatctatacccgcgcgatgcgttctcagctcgccgtggttatggcggcggtattcaactttttgggtgttttgctgggtggtctgagtgttgcctatgccattgtgcatatgctgccgacggatctgctgcttaatatgggaagctctcatggccttgccatggtgttctctatgttgctggcggcgattatctggaacctgggtacctggtactttggtttacctgcatccagctctcatacgctgattggcgcgatcatcgggattggtttaaccaatgcgttgatgaccgggacgagtgtggtggatgcactcaatatcccgaaagtattaagtattttcggttctctgatcgtttcccctattgtcggcctggtgtttgctggcggtctgattttcttgctgcgtcgctactggagcggcaccaagaaacgcgcccgtatccacctgaccccagcggagcgtgaaaagaaagacggcaagaaaaagccgccgttctggacgcgtattgcgctgatcctttccgctatcggcgtggcgtttagccacggcgcgaacgatggtcagaaaggcattggtctggttatgttggtattgattggcgtcgcgccagcaggcttcgtggtgaacatgaatgccactggctacgaaatcacccgtacccgtgatgccatcaacaacgtcgaagcttactttgagcagcatcctgcgctgctcaaacaggctaccggtgctgatcagttagtaccggctccggaagctggcgcaacgcaacctgcggagttccactgccatccgagcaataccattaacgcgctcaaccgcctgaaaggtatgttgaccaccgatgtggaaagctacgacaagctgagccttgatcaacgtagccagatgcgccgcattatgctgtgcgtttctgacactatcgacaaagtggtgaagatgcctggcgtgagtgctgacgatcagcgcctgttgaagaaactgaagtccgacatgcttagcaccatcgagtatgcaccggtgtggatcatcatggcggtcgcgctggcgttaggtatcggtacgatgattggctggcgccgtgtggcaacgactatcggtgagaaaatcggtaagaaaggcatgacctacgctcaggggatgtctgcccagatgacggcggcagtgtctatcggcctggcgagttataccgggatgccggtttccactactcacgtactctcctcttctgtcgcggggacgatggtggtagatggtggcggcttacagcgtaaaaccgtgaccagcattctgatggcctgggtgtttacccttccggctgcggtactgctttccggcgggctgtactggctctccttgcagttcctgtaatcgtacgcaccaaaacgagcgggtcagctggcccgcttcagattgtgacatagtgcgctttgttcatgccggatgcggcgtgaacgccttatccggcctacaaaaacatgcaaattcaatagattgcagagattatgtaggcctgataagcgtagcgcatcaggcaattttgcgtttgtaatcagtctcgagcgggtcagtttactggcccgctttttttatgcgttattattgctgaagtgcttaatgccaaatcatcaatgcaatcaggctgaccaccaccagaccacacaatgcgctggtcagaataaactgccgacgcacccgctcacagcggcgaataaattcatcatcgtgatgatcgcgataacgttgggcatagatataccaaacgagacgcacctgtttgttgggttggccatgattggtaaaaaagccccctccatcaacatattgatagagcaatggatcgcagttacgcagtaccactaacaacgcgcgtagactactgaaatagcgcgccatgttaacaatgcaaacgacacataaagcccaaaataatgcgacggtgcttatcatacctcctccccggcgacctgcccgcggagttccaccccggggctaccgctcccgatacgctgccaatcagttaacaccaggtcctggagaaaccgcttttgtggtgaccaacatacgagcggctctatagatagtgtaggagatcaggttgttttttttccagaaggttaaccactatcaatatattcatgtcgaaaatttgtttatctaacgagtaagcaaggcggattgacggatcatccgggtcgctataaggtaaggatggtcttaacactgaatctttacggctgggttagccccgcgcacgtagttcgcaggacgcgggtgacgtaacggcacaagaaacgctagctggccagtcatcgacaactttatggaaggagtaacactatggcttataaacacattctcatcgcggtcgacctctccccggaaagcaaagttctggtagagaaagcagtctctatggctcgcccctacaatgcgaaagtttctctgatccacgtagatgtaaactactctgacctatacaccgggcttattgatgtgaatctgggtgatatgcagaaacgcatctctgaagagacacatcatgcactgaccgagctttccactaatgcaggctacccaatcactgaaaccctgagcggcagcggcgacctgggccaggttctggtcgatgcaatcaagaaatacgatatggatttggtggtttgtggtcaccaccaggacttctggagcaaactgatgtcttccgcacgtcagctgatcaacaccgttcacgttgatatgctgattgttccgctgcgcgacgaagaagaataatcttccctctacgacgtgttcctgaacgcccgcatatgcgggcgttttgctttttggcgcgccttgttacctgatcagcgtaaacaccttatctggcctacggtctgcgtacgcaatcaaaatccccagccaatacaacatttaacaccatcatattttccatcattagtgtgatcatctggttattttctgttgtaatagtgtattaatctattcaccgcatcaatattaagaatctctgacagatgtaaactttttcgcgcgttatcccttacgcgttcatacttttcaggatggtattggaaggttaataaatatgaatacaacaacacccatggggatgctgcagcaacctcgcccatttttcatgatcttttttgtcgagttatgggagcgattcggctactacggcgtgcagggcgtactggcggttttcttcgttaaacagcttggattcagccaagagcaggcttttgtcacttttggtgcttttgctgcgctggtctatggcctcatttccattggcggctatgtcggcgaccacctgctggggaccaaacgcaccattgttcttggagcacttgtgctggcgattggctacttcatgaccggcatgagcctacttaagcctgacctgattttcatcgccctggggactatcgctgtcggtaacggcctgtttaaagctaacccagccagcttgcttagcaagtgctatccgccgaaagatccgcggcttgatggcgcattcaccctgttctatatgagcatcaacatcggcagcttgatagcgttaagcctggcccctgtgatcgctgatagattcggttatagtgtcacctacaacctgtgcggggcggggttaattatcgcattactggtttacatcgcctgtcgtggaatggtgaaagacattggttctgaacccgacttccggccaatgagcttcagcaaactgttgtacgtgttacttggcagcgtggtgatgatcttcgtatgcgcatggctgatgcacaacgtagaagtcgccaatctggtgctgattgttctctccatcgtcgtcaccatcatcttctttcgtcaggcattcaagctggataaaaccgggcgcaataaaatgtttgtcgcctttgtcctgatgctcgaagcggtggtgttttacattctctacgcccagatgccaacaagcctgaacttctttgccatcaacaacgtgcatcatgaaattctcggtttttccatcaacccggtcagcttccaggcgcttaacccgttctgggtggtactcgccagcccaatactggcaggcatttacacgcatctgggtaacaaaggcaaagacctcagcatgccgatgaaatttactctcggcatgtttatgtgcagtctgggctttttgacggcggcagctgcgggaatgtggtttgcggatgcacaagggctgacaagcccatggtttatcgtgctggtgtacttattccagagcttaggtgaactgtttattagcgcccttggcctggcgatgattgctgccctggtgccgcagcatttgatgggctttattctcgggatgtggttcctgacgcaggctgccgcgttcttgctgggcggctatgtggcaacatttaccgcggtgccggacaacattaccgatccgcttgagacgttgcccgtctataccaacgtgtttggtaagattggtctggtcacgctgggcgttgcagtagtgatgctgttgatggtgccgtggctgaaacgcatgattgcgacgccggaaagccattaattattcttgcagaaagcagggtagcgttatcgctaccctgttttagttttacactggcgtacctgcatagatatcaaagcgatgccctttagtgactaccgcgtttggcgtggcgacattcgccagcggtggcgcgtagtccgggcgctttaccaccacgcgtttggtcgccagcaagcgtgcaggctccagtaatccatcggcatcaagatccggtcccaccaggctctgaaagacacgcatctcttttttcactagcgcgcttttctgcttatgcgggaacatcgggtcgagataaaccacctgcgggcgcggggtaatatcagtcagcgccgtcaggctggaggcgtgaattaactgcaaccgctcctgcaaccagccgccgatttccgcatccgcataaccacgcgccaggccgtcgtcgagtagcgcggcaaccactggattacgctccagcatccgcacgcggcagccgacactagccagtacaaaggcatcgcgcccaagtcctgcagtggcatccaccacatccggcaaataatcgcctttaatgcccaccgctttcgccaccgcctcaccgcgaccaccgccgaatttgcgtcggtgcgccatcgctccgccaacaaaatcaacaaagatgccgccaagttttggctcatcacgcttgcgcaattccagatgttccggcgttaacaccagcgccatcaggttgtcttcatcgtgctccagcccccagcgggccgccagaacagataaggcaccgtctccggtgcctgtttcatcaattaagcagattttcactgaatgatcagcccttaatgccgtaatgctccagcatcgcatccagctgcggttcacgaccacggaagcgtttgaacagatccatcggctcttcactaccgccacggctcagaatgttgtcgaggaagctctgcccggtttcacggttgaaaatgccctcttcctcaaagcggctgaaagcatctgccgccagtacgtcagcccacaggtagctgtagtaacctgcggcataaccaccggcgaaaatatggctgaaagcgtgcgggaaacggccccaggacggagatggcaccacggcaaccagtttcttgatttctgccagagtttcgaggatttttgccccctgatccgggcggaactcggcatgaaggcggaaatcaaacaggccgaactccagctgacgcagaataaacagcgccgcctggtagttcttcgccgccagcattttatccagcaactctttcggcagcggttcgccggtttcatagtgaccagagataaacgccagcgcctccggctcccagcaccagttttccataaactgactcggcagttcgaccgcatcccacggcacaccgctgataccggaaacaccagcggtttcgatgcgggtcagcatatggtgcaggccgtgaccgaactcgtggaagagggtgatcacttcgtcgtgagtgaacagcgccggtttaccatttaccgggcggttgaagttacaagtcaaatacgcgaccggtttttgcaaagaaccatcagctttacgcatctggcctacgcagtcatccatccacgccccgccgcgcttgttttcacgggcatacagatcgaggtagaagctaccgcgcagttcgttattttcgtcatacagttcgaagaaacgtacatccggatgccagacatcaacatctttacgctctttagcggtgatgccgtaaatacgcttaaccacttcaaacaggccgttaaccgctttgttttccgggaagtacggacgcagctgttcgtcactgatgctgtagaggtgctgtttttgtttttcgctgtagtaagcgatatcccacggctgcaactcatcgacgccaaattcggctttggcaaaggcacgcaattgcgccagctctttttcgccttgtggacgcgcgcgttttgccagatcggttaagaaatccagcacctgctgcgggttttctgccattttagtggcaagggatttaaaggcgtagttttcaaagcccagcagttgcgccagttcgtgacgcagcgcgaggatctcttccatcaccttgctgttatcccatttaccggcgtttgggccttgatcggaggcgcgggtgctgtaagcgcgatacatctcttcacgcagagcctggttgtcgcagtaggtcattaccggcaagtagcttgggatatccagcgtcagcaaataaccttccagctctttcgcttcggcctgggcttttgccgcagccagcgcgctttctggcatccccgccagctccgcttcgtcggtaacgagtttggtccagcccattgtcgcatcgaggacgttgttgctgtactggttgcccagttcagaaagacgggtcgcaatttcgccgtaacgctgctgtttctctttcggcagacctatgccagagagttcaaagtcgcgcagtgcgttatcaaccgctttcttctgcgccgtgttcagcgtggcgtaatgatcgccatcgcgcaggtcgcgatacgctttatacagcccttcatgttgccctacccaggtgctgtattcgctcagcagcggcagggtttgttcgtaggcttcacgcagttccgggctatttttcacgctgttcaggtggctgaccggggagaagatacgccccaacacatcgtccacttccgccagcggctggcagagattttcccaggtgtacggtgccccttgcgctactacgcgctccacgttttcgcggcagtcgttcaatgccttagtcacggctggaacgacatgttccgggagaattttagaaaacggaggcaattcaaagggagtcagtaacggattcgtcattcgcgcagtcctggttaaagaggttaaggaagcgctcaacaggcgctttacataatgtgtgtagcatggggttaagtgtagtgaatttcaatgagaaacgttacgctttcgcggcggcggcctcttttcggtatactgtcctgatacgcttttgtgcgccccgaatacgggccgatttttacttaccggaacacctttacccatgctcagttatcgccacagctttcacgctggcaaccacgccgacgtccttaaacataccgttcagagcctgatcatcgagagcctgaaagagaaagataaaccgtttctctatctcgacacccacgcaggggccgggcgttatcagttaggcagcgaacatgccgagcgtaccggcgaatatctcgaaggcatcgcccgtatctggcagcaggacgatttgcccgcagaactggaggcgtacatcaatgtggtaaaacacttcaaccgtagcggtcagttgcgttactaccccggtagcccgttgattgctcgcctgctactgcgtgaacaggacagcctgcaactgaccgaactgcacccgagcgattacccgttgttgcgttctgaatttcagaaagatagccgtgcgcgtgtcgaaaaagccgacggtttccagcagcttaaggccaaactgccgccggtttcccgccgtggtttaatccttatcgacccgccgtatgaaatgaaaactgactatcaagcggtggtcagcgggatagcagaaggttacaaacgtttcgccactggtatttacgcactgtggtatccggtggtgctgcgtcagcaaattaagcgcatgatccacgatctggaagcgaccggtattcgcaaaattctgcaaattgaactggcggtactgccagacagcgatcgccgtggcatgaccgcttccggcatgattgtgattaacccgccgtggaaactggaacaacagatgaataacgtgctgccgtggctgcacagcaaactggttccggcaggcaccgggcacgccaccgtaagctggatcgtgccggagtaattgcagccattgctggcacctattacgtctcgcgctacaatcgcggtaatcaacgataaggacactttgtcatgactaaacactatgattacatcgccatcggcggcggcagcggcggtatcgcctccatcaaccgcgcggctatgtacggccagaaatgtgcgctgattgaagccaaagagctgggcggcacctgcgtaaatgttggctgtgtgccgaaaaaagtgatgtggcacgcggcgcaaatccgtgaagcgatccatatgtacggcccggattatggttttgataccactatcaataaattcaactgggaaacgttgatcgccagccgtaccgcctatatcgaccgtattcatacttcctatgaaaacgtgctcggtaaaaataacgttgatgtaatcaaaggctttgcccgcttcgttgatgccaaaacgctggaggtaaacggcgaaaccatcacggccgatcatattctgatcgccacaggcggtcgtccgagccacccggatattccgggcgtggaatacggtattgattctgatggcttcttcgcccttcctgctttgccagagcgcgtggcggttgttggcgcgggttacatcgccgttgagctggcgggcgtgattaacggcctcggcgcgaaaacgcatctgtttgtgcgtaaacatgcgccgctgcgcagcttcgacccgatgatttccgaaacgctggtcgaagtgatgaacgccgaaggcccgcagctgcacaccaacgccatcccgaaagcggtagtgaaaaataccgatggtagcctgacgctggagctggaagatggtcgcagtgaaacggtggattgcctgatttgggcgattggtcgcgagcctgccaatgacaacatcaacctggaagccgctggcgttaaaactaacgaaaaaggctatatcgtcgtcgataaatatcaaaacaccaatattgaaggtatttacgcggtgggcgataacacgggtgcagtggagctgacaccggtggcagttgcagcgggtcgccgtctctctgaacgcctgtttaataacaagccggatgagcatctggattacagcaacattccgaccgtggtcttcagccatccgccgattggtactgttggtttaacggaaccgcaggcgcgcgagcagtatggcgacgatcaggtgaaagtgtataaatcctctttcaccgcgatgtataccgccgtcaccactcaccgccagccgtgccgcatgaagctggtgtgcgttggaagcgaagagaagattgtcggtattcacggcattggctttggtatggacgaaatgttgcagggcttcgcggtggcgctgaagatgggggcaaccaaaaaagacttcgacaataccgtcgccattcacccaacggcggcagaagagttcgtgacaatgcgttaaatgttaaagggctaagagtagtgtgctcttagcccttaattacgtttccgctatcagttcagaagctgaagcagaaagcggatcagttccagcagcgcaattaacgcccctagaacgatgattgctttatcaatcacccgttttctccatgcgatggagtgagaatgcatccgcttactcatccactgcctgtcacggcgcatgtctcattgttagataagaactctctcactccggccagagcatcagttaacggcaccacccgtacttctgaccaggactttgaaagcgtttatgcgcattgccagagtgaaaatgcctcagagctaactggataatcatacagtacatgcaggttataaaaccagcacgtccttgcaatagtttcagtatggtattagcattgatgcgttagatgatggctatctcactccagtcagagccaccaactcagggctggaaagtaaaaaaccgacgcaaagtcggtttttttacatccggattcggacaaggcttaatatgacgatgacccagtgaaagtatataaatcgtcactgcgatatataccgaagtgctccctccgccagctgaagaaatcgctaattcttgcaatgttagccactggctaatagtattgagctgttagataagaactctctcactccagccagagccaccaactcagggctggaaagtaaaaaaccgacgcaaagtcggtttttttacgtcctgattcagacctcctttcaaatgaatagccaactcaaaattcacacctattaccttcctctgcacttacacattcgttaagtcatatatgtttttgacttatccgcttcgaagagagacactacctgcaacaatcaggagcgcaatatgagttttctgttacccatccaattgttcaaaattcttgctgatgaaacccgtctgggcatcgttttactgctcagcgaactgggagagttatgcgtctgcgatctctgcactgctctcgaccagagccagcccaagatctcccgccacctggcattgctgcgtgaaagcgggctattgctggaccgcaagcaaggtaagtgggttcattaccgcttaagtccgcatattccagcatgggcggcgaaaattattgatgaggcctggcgatgtgaacaggaaaaggttcaggcgattgtccgcaacctggctcgacaaaactgttccggggacagtaagaacatttgcagttaaaaatttagctaaacacatatgaattttcagatgtgttttatccgggaggcattatgttactggcaggcgctatctttgtcctgaccatcgtattggttatctggcagccgaaaggtttaggcatcggctggagtgcaacgctcggcgcagtactggcgttagttacgggcgtggtccatccgggtgatattccggtggtgtggaatatcgtctggaacgcgacggctgcgtttatcgccgtcattatcatcagcctgctgctggatgagtccggcttttttgaatgggcggcgctgcacgtcagtcgctggggtaatggtcgtggtcgcttgctgtttacctggattgtcctgctcggtgctgccgttgccgccctgtttgccaatgatggcgcggcgcttattttgacaccgattgtcatcgccatgctgctggctttagggttcagtaaaggcactacgctggcgttcgtgatggcggccggattcattgccgataccgccagcctgccgcttattgtctccaacctggtgaatatcgtttccgctgatttctttggcctcggctttcgcgaatacgccagcgtgatggtgccggtggatatcgccgcgattgttgccacgctggtgatgttacatctctattttcgcaaagatattccgcagaactacgatatggcgctgctgaaatctcccgcagaagcgatcaaagatcctgctacgttcaaaactggctgggttgttttactgcttctgctggtgggatttttcgtcctggaaccgctcggcattccggtgagcgccattgcagctgtgggcgcgctgatattatttgtcgtcgctaaacgcggtcatgcgattaatacgggtaaagtcctgcgcggtgccccctggcagattgtcatcttcagcctcggcatgtatctggtggtttatggcctgcgcaatgccggattaacggaatatctttctggcgtactcaacgtgctggcggataacggcctgtgggccgcgacgctcggcaccggattcctcaccgccttcctctcttctattatgaacaatatgccgacggtactggttggcgcgttgtccattgatggcagcacggcatctggcgttatcaaagaagcgatggtttatgccaatgtgattggctgcgatttgggaccgaaaattaccccaattggtagcctggctacgctactctggctgcacgtacttagccagaagaatatgactatcagctggggatattacttccgtacagggattatcatgaccctgcctgtgctgtttgtgacgctggctgcgctggcgctacgtctctctttcactttgtaatgagatactgatatgagcaacattaccatttatcacaacccggcctgcggcacgagccgtaatacgctggagatgatccgcaacagcggcacagaaccgactattatccattatctggaaactccgccaacgcgcgatgaactggtcaaactcattgccgatatggggatttccgtacgcgcgctgctgcgtaaaaacgtcgaaccgtatgaggagctgggccttgcggaagataaatttactgacgatcggttaatcgactttatgcttcagcacccgattctgattaatcgcccgattgtggtgacgccgctgggaactcgcctgtgccgccctagtgaagtggtgctggaaattctgccagatgcgcaaaaaggcgcattctccaaggaagatggcgagaaagtggttgatgaagcgggtaagcgcctgaaataaagcggcgatatcccccccacaggttgttagaaaagtgcgctttatttatgtcggatgcgacgctggcgcgtcttatccgacctacaaagttatgaaaattcgatgaatagtatgttatttgtaggcctgacaggcgtagcgcatcaggcgattttgctatttacacagtactccctgcgtgagattccaattatcgcgtccagcatggtgtatcagtgagctgcttagttatcagcgatacagcgcagtagtttaaagacgtactggattatgatttatcagtggtttacacaacaaattattaaataattataagataccttaacccattttattattacacatctaaaacatcacaaaaaaaatcacttcacacactatcagagaacataataactttttaaaatgagcgcattttgatagttgttaacgatttcctttacgatactatcactaccctttttttacacacaaatattaccgggtggagataaaagggaaatcaaaggtaattatatcaggaagatataacgcattacatttattgtgtgtagaagaaaatccattcctgttctaattatccaatttaaacatcttagcataaaacaaatgatgaataaggaattttatattgattattagcactttataatcattgaataaaaatagattttatgtacttttaaaacaatgcactatattatggggtgatggatattcatgtcacgccccaaaattaactgagttcacctaaacagaaaggatataaacatcagacaggtttacgttactatcaggcatatcacctcagaatcagatgaaaactataaagaaatatctattatggttttaatatttgttgataaggatagtaacatgaacatgacaaaaggtgcactcatcctcagccttagttttttgcttgccgcatgtagtagtattccgcaaaatatcaaaggcaataaccaacctgatattcaaaaaagttttgttgctgttcataaccagccggggttatatgttggtcaacaagcgcgctttggtgggaaggttatcaacgttatcaatggcaaaacggatacgttgttagaaatctctgtattaccgttggatagctatgcgaagcctgatattgaagccaactatcagggccgactgctcgccagacaaagcggcttccttgatccagtgaactatcgtaatcactttgttaccatcctcggcaccattcagggtgaacaacctggctttatcaataaagtcccgtataacttcctggaagtgaatatgcagggcatccaggtgtggcatttgagagaagtggttaataccacctataacctgtgggattacggctatggtgcattctggccggaaccgggctggggtgcgccttactacaccaatgcggtgagtcaggtaacacctgagctggtcaaataacaccaccgaaagatgcagatgctttctcagcatctgcatcatgcattacatcaaattaatacacagtaagctaactattattattataagccctgtcctgttaattacctttggcaaactgattataaagttaatgtccgcaccaggagtcggttatgtttcttataattaccagggatacgatgttcttcaccgcgatgaaaaacattctgagtaaaggtaatgtcgttcatatacagaacgaagaagagatcgacgtaatgttgcatcagaatgccttcgtcattattgatacattaatgaataatgtatttcattctaattttctcactcaaattgaacgattaaaacctgtccatgtcattattttctccccctttaatattaaacgctgcctggggaaagtgccggtgacctttgttccgcggactatcactatcattgattttgtcgcactcatcaatggcagttactgctctgtgcctgaagcggctgtgagtcttagccgcaagcaacatcaggttctgagctgcattgcgaatcaaatgacaacggaagatattctggagaaactgaaaataagcctaaaaacgttctactgccataaacacaatatcatgatgatcctcaatcttaagcggatcaatgagctggtacgccatcagcatattgattatctggtgtgaatttcaggcttacggtgagtctggctacgctgccacacagattagctaatactaacgcctttcacccctgccataccttttaataatcgcaacaggtcttctatgctcgttgtggcatgaagctggatatcaatggcgaccacttcatgatcttcattttcctgcaagctaactaaatcagtttttattttttgctgcttaaaccagtcgagcatacttaccgtattaccgttcactaatgtcagctgtaaatggtaatttttgttcatcaggcggaaggttaattgatggaagacttccagcaccaacaaggtcatcacactaccataaatacccagttcgtacataccgctgccaataaccatacctatggcggcggtcacccagatatccgctgccgtcgtcagacctacaatattttggttacgaacgagaatgttacctgcaccgataaacccgacgcccgtcaccacctgagcagcaatacggctggggtcgagtccgacgtgatctaaagacagcacgtcagcaaaaccatatttgctaacaatcataaacagggcgcttcccatgccaattaatacatgtgtgcgtaaccctgctcctttgccgcgcatttgcctttccatgccaatagcgccacaggcaattgccgcgagtataagacgtataataaattctgctgtcatataaaaatgcaaaaaggagcagcaagatggctcaacttgctactcctttttacttgcacctcattaattcggcaagtcattagatgcttgatttttgaaggtatacaaatttttctgcgggtttttcttacagtattcgatcactttaggaatttgagtgagatcggtttcatttaaagtaacggtatcgccacctttatatactgtttcttcatgcagcatccaccatgcaaccggggtcattgcttttggattcagatcaataaattcctggcaggtcatatctttagcggattcattggctgccaacgcagattgtgcgttcaccagactcaaagccgctacagcgcccataaaaataaacgctttacggagagaactaatattcattttgtaacccattcaatatagagattatatatgaacaggaggaatagctgcttttaaagaagatattccggcctgttcaatatgcaaggaagtacgatgtaacgcattcccggaattacatatctttcttaattttgtcccattcgcctttaactttatctttaaagttggcttgtttatcctgagtacaagcctgaacgatagctggggttacggttgcaataccctgaacatctaaaaccgcatcttctggtttatctttgttgttcagcgcttcagcaaaaccaactgcagttggctggaaggattcgtccacagccaggaaatcttcacaggtccaggagttgaccggttttttgttatcagctgctttttgcgcatccgctgcattgctcacaactggcagaagaagcagaccaccaagaataacgcctaatacttttttcatcgtaatatcctcaactataaagtgaaagagccgtcacgaatcaatttcgacactgaggttataacctggttttctgtatatgtcatgttgatggaaaatatcaaaatcagatatttttatttcaatacaatgagttacagatgcatcagatactgcaattaggaaatttttattaaatcgactgcattcttagacgcgtttttggcatagattgatagcaggggattttcttcttaattttatagggtggttctatgttatatatagataaggcaacaattttgaagtttgatctggagatgcttaaaaaacatcgcagagcaatccagtttattgccgtgctgctgtttatcgtcgggttgctgtgtatcagtttcccgttcgtctctggcgatattttaagcacagtagtgggtgcattattaatctgcagcggtattgcgcttattgtcgggttattcagcaaccgcagtcataatttctggccggtattatccggtttcctcgtcgcagtcgcctatttattgatcggctatttcttcatccgcgcaccggagctgggcatttttgccattgcggcatttattgccggtttgttctgtgttgcaggggttattcgcctgatgagttggtatcgtcagcgtagtatgaaaggcagctggctacagctcgttattggtgtgctggatatcgtcattgcctggatattccttggtgcaacgccgatggtgtctgtaacgctggtttccacactggtgggaattgaactgatatttagcgccgccagcctgttcagcttcgccagtttgttcgttaagcagcaataattaccccggttgtcacccggatcatagtcacttgatgtgactatgatccgattaatactctctccgctacgcagtgttgtagatcaattgcgcactatcattgaaataattacctgctagtgattatttcaacctactgaatttcatctaatttttttcactctatggcaaattagccatttcaaacattatcatggctgatattttccgtagtcaggtttaatgttttaaaagtgctgtgggaaagtgaacaaagagttccgtaagcgttgatgctatgggcggttaaataagtaatccgggttcatttttttgcaactggcgttgattacattgcataaatatccgtgtctccagacgctatataaaaacctgaagacatgaatgcgttatttactcaggtaatttcaatgcgttaaaagaaagctggcaatccaattgccagcttaagtcgaaacaaggagactcgatatttaaatcggattacattttaactttagtaatattcttcagagatcacaaactggttattgataacttattcttgggcagtaatccgcaaacgttaactttttgtttgctatttacaagctgataacaaccaggaatcttacttaggatcaatatatggagtgcgtgatggataaatctgaagtattgattagtgttaatagacgtattagttcacgaagggtaaagttcttataggcgtttactatattgaacaacgattcggacaaggatgtaaataatgaaaaggatgacatattcgaaacgataacggctaaggagcaagttatgatttttctcatgacgaaagattcttttcttttacagggcttttggcagttgaaagataatcacgaaatgataaaaatcaattccctgagtgagatcaaaaaagtaggcaataaacccttcaaggttatcattgatacctatcacaatcatatccttgatgaagaagcgattaaatttctggagaaattagatgccgagagaattattgttttggcaccttatcacatcagtaaactaaaagctaaagcgcctatttattttgttagccgcaaagaaagtatcaaaaatcttcttgagattacttatggtaaacacttgccccataagaatagtcaattatgttttagtcataatcagttcaaaattatgcaactgattctgaaaaataaaaatgaaagcaatatcacgagcacgctcaatattagccaacaaacattaaagattcagaaattcaacattatgtacaagctgaaactaagacgtatgagcgacatcgtcaccctgggtatcacatcttatttttaatcaggacataagcaactgaaattgatggctggcatgacgagggatgcagatgctgatttcattacccccggtgattactaaaggagaggctaaaacgactttattcccctggtatgtgtatccaccagtagaacccttcgttgcccgaatgctggcaggaactgttggcagaacggcaacattttttttgtcgttgacctcaccatgtcgatcactgtgcctgtatcccaccttactggctgacaaccccactatgccgctggtctgtaaatccctcatatctctcctcgcgcgcaatttaaagaaccgttatttctcaagaattttcagggactaaaatgaacagaagaagaaagctgttaataccgttgttattctgcggcgcgatgctcaccgcctgcgatgacaaaagcgcggaaaacgccgccgccatgacgcctgaggtcggtgtcgtcacactctcccccggtagcgtcaatgtgttgagcgaattgcccggtagaaccgttccttatgaagttgccgagatacgtccccaggtgggcggtattatcattaaacgcaactttatcgaaggcgataaagtgaaccagggcgatagcctgtatcagattgatcctgcacctttacaggccgagctaaactccgccaaaggcagcctggcgaaagcgctctctaccgccagcaatgcccgcatcacctttaaccgccaggcaagcttgctgaagaccaactacgttagccgtcaggattacgacaccgcgcgcacccagttgaatgaagcagaagccaatgtcaccgtcgccaaagcggctgttgaacaggcgacgatcaatctgcaatacgcgaatgtcaccagcccgattacgggcgtcagcgggaaaagcagcgtgaccgtcggcgcactcgttaccgctaatcaggcagatagcctggttaccgtacaacgtctggacccgatttatgtcgatctcacgcagagcgtgcaagatttcttacgcatgaaagaagaggtcgccagtgggcaaatcaaacaggttcagggcagtacgccagtacagctcaatctggaaaatggtaaacgctacagccagaccggcacgctgaaattctccgacccgacagtggatgaaaccacgggctccgtgacgttacgggcgattttccccaacccaaatggtgacttgctgcctggcatgtacgtcacggcattagtggatgaaggtagccgccagaatgtattactggtgccgcaggaaggcgtcacccacaacgcccagggtaaagcaacggcgctcattctggataaagacgatgtcgtgcagctacgcgaaattgaagccagcaaagccatcggcgaccagtgggtcgtcacctctggcttgcaggctggcgatcgggtgatcgtttccggtttgcaacgcattcgtccgggtatcaaagcacgagcaatttcctccagccaggaaaacgccagcaccgaaagcaaacaataacgttgcaggcttaaggggactttcatggctaactattttattgatcgcccggtttttgcctgggtacttgccattattatgatgcttgcaggtggtctggcgatcatgaacttaccggttgcgcagtatccgcagattgcgccaccgaccattaccgtcagcgctacctatccaggtgccgatgcgcaaacggtagaagacagcgtcactcaggtgattgagcaaaatatgaatgggcttgatggcctgatgtacatgtctagtaccagtgatgcggcgggcaatgcctctatcactctgaccttcgagactgggacatctcctgatatcgcacaggttcaagtgcaaaataaactgcaactcgctatgcctagtttacctgaagcagtgcagcagcaggggattagcgtcgataagagcagcagtaatatcctgatggtagcggcgtttatttctgataacggcagcctcaaccagtacgatatcgcggactatgtagcgtctaatatcaaagacccgctaagccgtaccgcgggcgttggtagcgtacaactctttggttccgagtatgccatgcgtatctggctggacccgcaaaaactcaataaatataacctggtaccttccgatgttatttcccagattaaggtgcaaaacaaccagatttccggtggtcaactgggtggcatgccacaggcggcagaccagcagctaaacgccagcatcattgtgcagacgcgtctgcaaacgccggaagaatttggcaaaatcctgttgaaagttcagcaagatggtagccaagtgctgctgcgtgatgtcgctcgcgtcgaacttggggcggaagattattccaccgtggcacgctataacggcaaacctgctgccgggatcgccatcaaactggctgccggagcaaacgccctggataccagccgggcagtcaaagaggaactgaaccgcttaagtgcctatttcccggcaagtctgaagacggtttatccttacgacaccacgccgtttatcgaaatttctattcaggaagttttcaaaacactggttgaggctatcatcctagtcttcctggtcatgtatctgtttttgcagaatttccgtgccacaatcatcccgacgattgccgtaccggtggttattctcgggacgtttgcgatcttgagcgcggtcggtttcaccatcaacacgttgactatgttcgggatggtgctggcgatagggttactggtggatgacgccatcgtggtggtggagaacgtcgagcgtgtcattgcggaagataagctaccgccgaaggaagcgacgcataaaagcatggggcagatccaacgtgcgctggtcggtattgccgttgttctttccgcagtgtttatgccgatggcctttatgagcggtgcaaccggggagatctaccgccagttctccatcacgctgatctcctccatgctgcttagtgtatttgtggcaatgagcctgacccctgccctgtgcgccaccattctgaaagccgcgccggaaggcggtcacaaacctaacgccctgttcgcacgcttcaacacgctgtttgaaaaaagtactcaacactataccgatagcacccgcagcctgttgcgttgtaccggtcgctacatggtggtctacctgctgatttgcgccgggatggcggtgctgttcctgcgcacgccgacctctttcttaccagaagaggatcagggggtatttatgaccaccgcgcagttaccttccggtgccaccatggttaacaccacgaaagtgctgcaacaggtgacggattattatctgactaaagagaaagataatgtccagagcgtgtttaccgttggcggctttggcttcagcggtcaggggcaaaacaacggcctggcgtttatcagtctcaagccgtggtctgaacgtgtcggtgaggaaaacagcgttaccgcgatcattcagcgggcaatgattgcgttaagcagtatcaataaagccgtcgtcttcccgttcaacttacccgcggtggctgaactgggtaccgcgagtggttttgatatggaactgctggacaacggtaacctggggcacgaaaaactaacccaggcgcgaaacgagctgttaagtctggcagcgcaaagtccgaatcaggtcaccggggtacgcccgaacggcctggaagatacgccgatgttcaaagtgaacgtcaacgctgcgaaagctgaagcgatgggcgtggcgctgtctgatatcaaccagacaatttccaccgccttcggcagcagctacgtgaacgacttcctcaaccaggggcgggtgaaaaaagtgtatgtccaggcaggcacgccgttccgtatgttgccggataacatcaaccaatggtatgtacgcaacgcctctggcacgatggcaccgctttctgcctacagctctaccgaatggacctatggtagtccgcgactggaacgctacaacggcatcccgagtatggagattttaggtgaagcggcggccgggaaaagtaccggtgacgccatgaaatttatggcagacctggtcgctaaacttccggcaggcgtcggctacagttggaccggactaagctatcaggaagcgttatccagtaatcaggctcctgcgctgtatgcgattagtctggtcgtggtgttcctcgccctcgccgcactctatgagagctggagtattccgttcagcgtgatgttggttgttccgttaggcgtcgttggcgcattactggccaccgatctgcgcggcttaagtaatgacgtctacttccaggttggtttgctgaccaccatcgggctttccgccaaaaacgccatcctgattgtcgaatttgccgttgagatgatgcagaaagaagggaaaacgccgatagaggcaatcatcgaagcggcgcggatgcgtttacgcccaatcctgatgacctctctggcctttattctcggcgtgctgccgctggttatcagtcatggtgccggttctggcgcgcaaaacgcggtaggtaccggcgtgatgggcgggatgtttgccgcaacagtgctggcaatttacttcgttccggtctttttcgttgtagtggaacatctctttgcccgctttaaaaaagcgtaacgtgtaaatgagagtaaggttgaacatgaaggttcagccttactctttcctgctaaccattcaccactcaacaaccagctaaccgtcaggaataccaggcttagtacacagcactgaaagtagaaaccactccagccattcgtcatcaatttgaacaacacaatactgacccacattcccgtaatcgtatgaattgtcagcttaataatcccaaacatgccgagtcttttcctcctgaaaataccgataccgcctggcaaactgcgaaagagaactagccggtagcccggcagaaatcatcagggaagagtttcacatgaagcaggtgtgagatcctgaccaatattcaaatgcgaaatatgtcaggaaaaggtacctgggctatgttgcgcaaactgatgtggcgttacaccataatattgtcgaaatgtgtttataaagtagcttgtactgctatagccacatttttccgcaatagtatgcagaggaatttgacgtaactcgagtaatcgtctggccatgctcatcctggaggcgagtaatattttactgaaacaggtattttcatcctgcaacttttttttgattagactctcgctggtatacattctttccgcgatatcgcgcagataccaacgtttggcgatatcaaagctaataaggcgttcaacttttccactaacagtgctgatgctattgaaaagtaaggggatcagttctttcttatgagaaaacatgcttaaacaggaaaggtagagcatattgctcagtatcggactatttaccccggattcattgaagctatcaaaaatcgccgtcaccagcggcatggggggactctggttaattaacaaacggtctttgctgtgtaaccctaaattgcgtggtagctgacgaatattttgtaagtaatggcaaactgtcagctcatcgatatccagtcgtcgcgtatccggactacaaaacgcaaaatcgtctgccaaatttttctccagcagcagaatactctcgttatgcaggcttattttttgctgttcatgataaatatcgaaactacgacgaatgaggatcacgctgcagacatgagtcatgattatcccttatatttcatactgcgattatttcaatttcagtatactaatgaaatgatgccagactgtttcttagcgcaaaaactgccagatttggtaggaccaaaatttatccacaaagtagttttgcataacagttaattgataataagtaaatgcagcacgaatatattttcgcacagcgtatagcttatgtttataaaaaaatggctgatcttatttccagtaaaagttatatttaacttactgagagcacaaagtttcccgtgccaacagggagtgttataacggtttattagtctggagacggcagactatcctcttcccggtcccctatgccgggttttttttatgtctgagtaaaactttataatcttattccttccgcagaacggtcagtgccgtaaaaattcccttgcgcaacaatacttgccgcgctgtcacggttgctcaatctctgcgcgcttcgctcctgatactctgtgggcgtcatcccataataatttcgaaagacgtaaatgaaatagctcacgctgtgatatccacaggatactgcaactcgcttaatactaaaaccatgtataacaataagttgcaaagcacgttgcattctacactcagtaagcaactgactataacttgtctcttcttcgcgcaattttttctttaacagacttggactcatcaacagctcgctggcgattcgggctagtgtccactcatgggcgatattattattgataaccgtacaaactcgtgttcgcatgttcggttgtaaaacgttcagaagcagcggtataaagtgctcatcctcaagaaaaacagataacaacgcaaagattaatgctcttttacgtagcatttctgcatagcgaagattcttattctggcttagttgcgcaacttcctgaaaaacaggaatatctctactacagtgatgaacgagtaaactagaaacttttttatgtgcatgaagatttaatgcctcctccttgagcatcgggagaaataaactaagcgtgtccctactcacgaatacaaaattttcaacacacttatctactcgaatttggcttgcatccgcaaaaaccaggtcaccgccattaaaatagcgatattcaccattaaccatggtgagaatatatttatgtcttgcatacgcaattagacaattcccatgtagactttgcatagttgacttaatattacataaacatattactgtttattaatgtagcacgccgccctcttaagtcaaattgattgataaataaatttaaacgaagcgggagaacaggatgataatgtgtgatgttctacgggcaggatgactggatttataatacaaaaacgtgtttaagaacacagggaaattaatagtaagcaaataatcccttttcgtgacattaaaggtaatcgctacatttaataaacattcatataacatatatcttatcaacacgatgaatagacagccaatatattattgcgattaataagcaaccgaatgcccagctgtttttttaaaggctgggcattcggtttttacaacgttatgttatcaggtgtgtttaaagctgttctgctgggcaataccctgcagtttcgggtgatcgctgagatatttcagggaggctttgtagtcttccagcaacagttcagcaaagtccatttcgaagccgcgacgacacataatgcgcatcaccacgatgtcggtggcttcaccgccgagagtgaaggccggaacctgccagccgcgcagacgcagacgttcagagaggtcgtacagggtgtatcccggatcttcaccatctttcagtttgaagcaaaccgccgggatgccttcgtccgggcgacccgtacagatgaactcatacggccccagtttggcgatttcatccgccagataagcggcaacctggtaagaggcgttctgtactttggtatagccttcacgaccgaggcgcaggaattcatagtactgtgcaattacctgacccgccgggcgggagaagttgatggcaaaagtaccaatttgaccacccaggtagtcaacgttgaacaccagttcctgcggcagcgcttcttcgtcacgccagataacccagccgcagcccagcggagccagaccgaatttatggccactagcactgatgcttttcacacgcggcaggcggaagtcccagacgatatccggggcgacgaacggtgccaggaagccaccgctggcagcgtcgatgtgcatgtcgatgtcgataccggtgtcggcctggaatttatccagcgcatcgtgcagcggttgtgggaactcatagttaccggtgtaggtcacgccgaaagtcggcaccacgccgatggtgttttcgtcacaggcttcaatcatgcgtttcgggtccataaacaactgaccggggcgcatagggatctcacgcagctccacatcccagtagcgggcgaatttatgccagcagatttgtaccggaccgcacaccaggtttggtttatccgttggtttgcctgcagcttccatacgcttgcgccaacgccatttcatcgccatcccgccgagcatacaggcctcggaagaaccaatggtgttggtgccaacggcctgaccatttttcggcgcaggcgcatgccacagatcggcaaccatatttacgcaacgcaggtcgatggctgcggattgcggatattcttctttgtcgatccagtttttattgatgctcaaatccatcaatttatggacgttttcgtcgtcccaggtctggcagaaagtggccaggttctgacgagcgttgccatcaagatataattcatcattgataatctgaaatgcgacatcatcgcgcatttcgtgcagcggaaatcgtttactctccgcgatagtagaaatggcctttgcgccaaaacgactatcgagtagttcactgcggaaatccgttaacagcttctggtccatttcgaactccttaaatttatttgaaggcaataaaaaagtaggatttatccgcaatggaagcaaggcattacaggcttaatttaaataacaaaatcctaagcagaaaaacgactttttataatataaacatttaacatgataatattaaaaacagactttattatcgtaataaaaatcgcccaaacattgctgttcgggcgatcaaattaattattgtttatcctgcatatacggcgtgtacaccccgttcagactgtgcaggaaagctacgatatcatccacatcctcctgcggcagctctttgcctacctgatagcgcagcatcagtttcaccgccccgtccagcgtcggcacgtcaccgcgatggaagtacggtgccgttaaagcaacgttacgtaaaccgggtactttctgacgcaatttatcacgctcttctttagtcacattcatacgaccaatatccgccgccgtaatttccccaaagttaaagtcttttttcagccccaacggttcaaaggaacgtccgccgagaataataccaccatgacaagttgcacatttattatctttaaataattgatagccttttttctgttgcgccgtcagcgcattttcatctccgcgcaaccatttatcaaatggggaatccggcgtaattaatgttttctcaaattcagcaatggcatcagtaatattttcgccactgaaaccttgcggatagacttcgaggaactgcgttttaagctgcggatctttttccagcttagcaataatttcgtcccaggatttgctcgccatttcaatcgggttcaacggcggtccaccagcctgatcctgcaatgttgccgcacgaccatcccagaactgctcaacgttaaatacactgttaaataccgtcggcgcgttaatcggcccaactgcgccaccaacaccaatgcttgtttttctgccatcgacgccccccgcattcaacgcatggcaatgagcgcaactaatggtgctatcagcgcttaaacggggatcgtgatacagcgcaaaacccaacgccactttttgcgcatcggtaggcagtttttgcgggatgggctgcaccggttcattgcgatgttccggagcagtatcattgctggcgtaatattccgcgcgctgttttgcaatccaggccagtatttccgcccgctcttcatcactcaccttacccgcccagtgtagcgcggtataacgcgttggtggcatagtttcatactgcatcacccattcaatcttattcaaatcgctttggctaacgggtttatcagccagcagtgccgcacgcacggcctcaaggttaaaagatttatatccaagcttaatgtcgtaatccatcaactgtttcgcgccaggaatataataataggcgggtaattctgcgctaggcgtgtggcaatagtcgcatcctttttcgcggagaaagcctaaaaccttattattttcactgacagcagatgcctgaacatcggcctgtttactgcgtttattatcgtggtaccacacataaccagataaccctaaatagcaaatcgcgacgccagccaggccgatcgcggtaatacgactgaccattttcattattcttccctcacggtggtgagttattgtgacccagaaaattttccagaatgctgcaaacgtctctgcgagacaaagccatcataaaaaacagggagatacgctttttgataggaatcaatcaattacatgaatataaactatcaataagatagcctgtgcctattacccagatcaggaatggcatatcatgattgcggcgagagcaggattgaatgttctgaaaatgaaaaacaacaccaaatcggtatttttataaattccattgatattagtgcgttatattttttgacaggttaataaacgtgatccaccgcacgctttgtcgcccaccaggcggagcgaatgactacccttaaagaaaagccgataattagcgacgaatttcggaggttggatccttatgctcaatcagaaaattcaaaaccctaatccagacgaactgatgatcgaagtcgatctctgctatgagctggacccgtatgaattaaaactggatgagatgatcgaggcagaaccggaacccgagatgattgaagggctgcctgcctctgatgcgctgacgcctgccgatcgctatctcgaactgttcgagcatgttcagagcgcgaaaattttccccgacagtaaaacctttcccgactgcgcacctaaaatggacccgctggatatcttaatccgctaccgtaaagtgcgccgtcatcgtgattttgacttgcgcaagtttgttgaaaaccacttctggctgccggaggtctactccagcgagtatgtaagcgacccgcaaaattccctgaaagagcatatcgaccagctgtggccggtgctaacccgcgaaccacaggatcacattccgtggtcttctctgctggcgctgccgcagagttatattgtcccgggcggccgttttagcgaaacctactattgggattcctatttcaccatgctggggctggcggaaagtggtcgggaagatttgctgaaatgcatggccgataacttcgcctggatgatcgaaaactacggtcacatccccaacggcaaccgcacctattatttgagccgcagccaaccaccggtttttgcgctgatggtggagttgtttgaagaagatggtgtacgcggtgcgcgccgctatctcgaccaccttaaaatggaatatgccttctggatggacggtgcagaaagcttaatccctaatcaggcctatcgccatgttgtgcggatgccggacggaagcctgctcaaccgttactgggacgatcgcgacacgccgcgtgacgaatcctggcttgaggacgttgaaaccgcgaaacattctggtcgcccgcccaacgaggtgtaccgcgatttacgcgcgggggcggcctccggttgggattactcttcccgttggctgcgtgatactggtcgtctggcgagcattcgtaccacccagttcatccccatcgatctgaatgccttcctgtttaaactggagagcgccatcgccaacatcagcgcgctgaaaggcgagaaagagacagaagcactgttccgccagaaagccagtgcccgtcgcgatgcggtaaaccgttacctctgggatgatgaaaacggcatctaccgcgattacgactggcgacgcgaacaactggcgctgttttccgctgccgccattgtgccactctatgtcggtatggcgaaccatgaacaggccgatcgtctggcaaacgccgtgcgcagtcggttactgacacctggcgggattctggcaagcgagtacgaaaccggtgaacagtgggataaacccaacggctgggcaccgttacaatggatggcgattcagggatttaaaatgtacggcgatgaccttctgggtgatgaaatcgcgcgaagctggctgaagacggtgaatcagttctatctggaacagcacaaactgatcgaaaaataccatattgccgatggtgttccccgcgaaggcggcggtggcgagtatccgttgcaggatgggtttggctggactaacggtgtggtacgccgtttaattggtttgtacggcgaaccataatatttttacagccagccgctaacttcctgctggctgtaaaattatcctcttcaggaggagatatttaacatcattgccgcctgggtgcgatttttcacttccagacggcgatacagggattccagatgcgcttttaccgttccggtactgatattcagcgctctgccgatctccttattactttcgcccgccgctaacatggttaaaatctcccgctggcgggcgcttaagcttttgagatctttaatgtccttttccggcgtcgtccgccagtctccaggcagaaacatcatccccatcgccgcactatttaccgccaacgcaaatgtctcgacggtactatcacgaggcacaatggccagcacattaaaatggataacttcctgtaaccaccgtttattgcaatccgtcgccgtaattaacaccttaacctcaggaaattgcaccacggttttttgcagcaaccagtagcaaaactcaccatcctgatcgccatcgagcataactaaggcttcagggtaactttccagcttttgccataactcgtctgcctgactggccccctgaatactcactcctggaatacgctgctgtaaactgattttcattccatgaataaatatactctgcctgtcaaacatgactatttgcataactgaatctccacctgaatacgttaaaaagacttaagtagtggaagggtattacccgcgagaaaaaataagaattcgccatttggcggtggccattctacagagatgacgtgtagaaaatagttaccgatataaatagttacagctaaacgcctgaaattacatgtcgagggcactatttaaaacaattttgaggatttccttatattggtggttagtacgcatgcaattaaaaatgaaattccgcgaccacaagccaaaataacaaacggcaaggagacaaaaataagcacaaatagccaacacgtcctctgttcactttaaagggaatcgctgaaaaatacgctctgtttaaggggattcacctttctcagaaagctattccgcccttttcctgctgagaaatcgccacattcggcatgacaacattgtgaaacccggcattagatgttagaaaaaacaataaacaatgcgatatgcgcgttactgtttcgctgtgaacaacaaagcgtcaaagaaatggataaaattcacgcaatgcagttgttcatcaaagtcgcggagctggaaagtttttcccgcgcagcggatttctttgctttgccaaagggaagtgttagccgccagatacaggcactggaacatcaacttggcacccagcttctccagcgcaccacgcgacgggtcaaactcacgccagaaggcatgacctattatcaacgagcaaaagatgtgttgagtaatctcagcgaactggacggtctgtttcaacaggatgccaccagtatcagcggtaaattacgcatcgacatcccgccaggaatcgcgaaaagcctgttactgccgcgcctgagcgaatttctctatctgcatccgggaattgagctggaactgagtagccatgaccgtccggtagatattcttcatgatggttttgattgcgtgatacgcactggcgcgttaccggaagatggcgttatcgcccgtcccctcggcaaactgaccatggtcaactgtgccagtccgcactatctgacgcgctttggttatccgcaaagccccgatgatctgactagtcacgcaatagtgcgttatacaccgcacctgggtgtacatccgttaggttttgaggttgccagcgttaatggcgtccagtggtttaagtctggcggcatgttgacggtaaacagtagcgaaaactatctcaccgccggtcttgccggtctggggattattcagatcccgcgcattgccgtgcgcgaagccctgcgtgccgggcggcttattgaagtattacctggctaccgtgccgagccgctctcccttagcctggtttatccgcagcgtcgggagctttcccggcgtgtaaacctgtttatgcagtggctggctggcgtaatgaaagagtacctggactgaccgactatactttttaagaatgaccacgacagaaggacaaaagagcggatgacgcaggaaaacgagatcaaacgtcccatccaggatctggagcacgagccgattaagccgttggataatagcgagaaaggcagcaaagttagccaggcgctggaaaccgtcaccaccactgccgaaaaagtccaacgccaaccggttattgcgcacctgattcgcgcgacagaacgctttaacgatcggctgggtaaccagtttggtgcggctatcacctatttcagttttttgagcatgataccaattttgatggtgagctttgccgcagggggctttgtgctggcctcccatccgatgttgctacaggatatcttcgacaaaattctgcaaaacatcagcgatccgacgctagccgccacgttgaaaaacaccatcaacaccgccgttcagcagcgtacgactgtagggcttgtcggcctggcggtggcactttattccggcatcaactggatgggtaacctgcgtgaagcgattcgtgcccagagccgcgatgtctgggaacgcagcccgcaagatcaggagaagttctgggtaaaatatctgcgagattttattagcctgattggtttgttgattgcgctgattgtgacgcttagcatcaccagcgttgccggtagcgcgcagcaaatgattattagcgccctgcacctgaacagcattgagtggctgaaaccgacgtggcgattgattggcctggcgatttccatcttcgccaactatctgcttttcttctggatcttctggcggttgccgcgccaccgtccgcgcaaaaaagccctgattcgcggaacatttctggctgctattggttttgaagtgattaaaatcgtgatgacctacaccctgccaagcttgatgaaatccccctctggcgcagcatttggttccgtgctggggctgatggcatttttctacttcttcgcccgtttgacgctgttttgcgcggcgtggattgccaccgccgaatataaagacgacccgcgaatgccggggaaaacgcagccttaaaataggccggatgcggcgtaaacgccttatccggcatacgattttattcggcctggctccccgtaggccggataagatgcgccagcatcgcatccggctataatgcgcacataacctcttgaaactcgtccccagagcctcttcagccatctatttgggagcaaacaatttcattccaactcataaccccagcatataaatccagttggtaacttttatttaacctgaaaccagttttatccactatttataaaattatgtgaagcatttcatagaagaaaaatcactggcctaaacattatcccctttttgcctgatttttgaccatttccgcgatttgttacacattgaaatatcacttttgctgtgcgtaatatggctattcgttagccaaaaaataagaaaagattatgcaagcaacagccacaacactcgaccacgagcaagaatacacgccgatcaacagccgtaataaagtccttgtcgcctctctcattggcacagccattgagttcttcgacttttacatttacgccactgcggccgttattgtgtttccgcatatcttcttcccgcagggcgatcctacggcagcaacgctacagagcctcgccaccttcgccatcgccttcgtcgcgcgccccattggctctgccgtttttggtcattttggcgatcgcgttgggcgtaaagcgacgctggtcgccagcttgctaacgatggggattagcaccgtggtgattggtctgctgccgggctatgccacgattggtattttcgccccgctgctgctggcgctggctcgatttggtcagggtctgggcttaggcggtgaatggggcggcgcggcgctgctggcgactgaaaacgccccaccgcgcaaacgtgcactgtatggctcctttccgcagctgggcgcaccgattggcttcttctttgccaatggcactttcttgctgctttcctggctactgaccgacgagcagtttatgagctggggctggcgtgtgccatttatcttcagcgcggtgctggtcattatcggcctgtatgttcgcgtgagcctgcatgagagcccggtgtttgagaaagtcgctaaagcgaaaaaacaggtgaagatcccgctgggtacgctgctgaccaaacatgttcgcgtaaccgtactgggtacgttcattatgctggcaacctatacgctgttttacatcatgacggtctactctatgacctttagtaccgccgccgcgccagttgggcttggcctgccgcgtaacgaagtgttgtggatgttgatgatggcagttattggttttggcgtgatggtgccagtcgctggattactggctgatgcctttggtcgccgtaaaagcatggtaatcatcaccacgctgatcatcctgttcgcgctgttcgcctttaacccactgctcggttctggcaacccgattctggtttttgccttcctgctgctggggttaagtctgatgggtctgaccttcgggccaatgggtgcgctgttaccagagctgtttccgacagaagtgcgttacaccggagcaagcttctcttacaacgtagcgagcattctcggggcttccgttgcgccatatatcgcagcctggttgcagactaactacgggctaggtgcggtggggttatatctggcggcgatggctggcttgacgttaatcgccctgctgctgacccatgagacgcgacatcagagcttgtaataagagtgaaaagcctgatgcgctacgcttatcaggcctgaatttccatacaatatattgaattcgcaaggatttgtaggccggataaggcgttcacgccgcatccggcatgaacaaagcacactttgccaacaatctaaatctgtttaattgccggatgtcagacatccggcaattatcatcacttcttcatctggctcaaaatcgtccgacactgattagcctccccttcggaaggactgatcagtgccagtaacgccgccgccggtgttaccagcgttgccagtgccgcagcaacagcaccacgggcaatcagcggtccggctttcaccccagcctgcggatttttaaacgtcccccgcacatacagcgggctacgcagtgtgataatccgaattcctttactctccggatcaatagtcaaatccagctgttcgctagcaaaacttgccgtgccggtaacattaatcaacgcgttctcagtatcgaaagcaaaaatctgcgggcgcgccacgccgttggcaatattcagattcgccgccgcgcagttcacccgcacctcatcatcaccaaatatcgcaccgacaatgtagttgccgacattcagcccaacaatctccatcaggttgcggctcaccagcccgtcattcatcaacagtttcaggttgccgttactgttgcctaaaagtgccgccacgctgttaccgctaccgcgtagttccgcgtcaccgttcatttcccccagcgtcttctgcatcagttccacatcgggcatcagttctttcagtttcagtcgacgagcctgaatatctgcccgcccctgcatcggctttttatcgccttccagatgaatattcgccgcaatgctgccgcccgccatgccaaatttcagcggttgcaggcgcaggtcagcatttttgaggatgatatgagtagaaagatcgctaatcggcaggctactgccatgctcaatgcgccgccctttgaagcgaacatcggcatccataacgtcccatttatcggtttcgaagcggtcataaggcagcactttgcccgcaggctgaacgcttttttcgcccttcttctgttcagaccgtttgctcttttctgcccctttcccggaatcaacgccaatcaacggtcccaggtccgccagccgcaattgccggctctcgacatcaccttccagttttggtcgtggctttccggtggtgtagaccagagaaccgtggatatcgctatcaccaattcgcccattaaaaccgcgataatcaaagacgctgcttttttcagtgtcgattttcgctaccagccgaccatccgtttcaaacggcggggtatcgggcagcagaacgcccgtcagttcatagagatcacccagactatcgccagaaaatttaagccgtaaatcgacaccgcccatcttcattgggtcattcacgacgccatcaaaagcaacacgggtgttaccagagcggaaatcagcctgtaccggaaacggcgtcccttcgccacgcagcgccagcataccgcctatttttcccgtacccgtgagcggttcaccgttatatcgtccctgcgccttcaggccaaaaacgtaatcgcccaccttttctttatccgctttacctttgcttccagtaacttcgctgaacggcagcggcttgcctaagggatcaacaaaaatctccagatccgctttgcttactttgtcatcaatggcgatccgcccttgatcgaaaagaatattatccagccgaaagctccatgcgctcggctttgcattcgcgtctttgttatcatcgttggcaagattaaacgtccagttattgttcttttcagagaggcgaatcaggcgcgcgtcgggcttttcgagcttgatccacggcagccagaccgttttggtcagcagcgccagcggggccagcgttgcctctacgcgtggcaaatgcaccatcgtgacttcgggaatatccggtggattgccaagaatgatgtcttccgcgtgtacatggggccacggcacccagctgcgccagccagtttcttgtttttgccgctcccacaccacgcccagatcgccacggatagcgaacggacgattcaactccgcagagactttctggttgatagtcggtttgagtcgattccagtcaaaagttgcaatcaaaatgatcgccacgacaatcaacaacaagaaagccccactaatcgcagcggttattttgcctgccttgctcatcgttcgcttcctcatattcttcctgtgccagtcctaaagatagtccagccaggcggaaaatgaggcagcttatagcgccagaaccgccgtattcagcgtttctatcggtgccgggcgactaagaaaccagccttgtgcggcgaatgcggggctgttctgaacatcacgccactcttccggcgtttctacgccctcgacaatcaccccgcgacaatagcgattcattagatgtaaaagctgagaaaagagtgtgcgtccttccgggctctgacgcagcatcacaaacagttctcgcgcgattttgatgtagtcataacgcacttcacttagcgcagagaaatttgccatcccggtaccaaaatcatccagccacagcgggccaaattcacacatgctggcaaaggtactatctttcggcagacggatatgctccaccagttcgaaacgcagccagggaagacgctcaatctggcgcaggatttttggttgctgacgcagggcgatgagcgtagggccatcaatattgacgcttgccagcaggccgtgctctataaagaagtcggctttttgcgccagcaaatcaatctgctctttcacaacctccatccgatggctgacggtgatttcagtaaaatagcgatccggcggcaggcgttggctagggttcaagggatgcgtgaccaccgttaatagctccacggccattaaccgcccgcatgtttgatagatcggctgccaggtgtaagcacgctcacactgcaaccaaaaacgccgttcctgcaagctctcgatgcttgcttcagggttgcttattcgctggataacctgccttatcatcaaagatgtcctgtgtttaaaagtgatgctgcccggactcgacaaagattatcggcgcgtaagggcagaactttaccgcctggccggggtaaatttcctcactccacaacggaatctttcaggaatacgttctggctcaaaaaaataatggaacactgttttaatatggttgaccagcaaaccaccacagcgcaaactaacgctaattttttacagatcaggttcacgactatgtccaaaaagattgccgtgattggcgaatgcatgattgagctttccgagaaaggcgcggacgttaagcgcggtttcggcggcgataccctgaacacttccgtctatatcgcccgtcaggtcgatcctgcggcattaaccgttcattacgtaacggcgctgggaacggacagttttagccagcagatgctggacgcctggcacggcgagaacgttgatacttccctgacccaacggatggaaaaccgtctgccgggcctttactacattgaaaccgacagcaccggcgagcgtacgttctactactggcggaacgaagccgccgccaaattctggctggagagtgagcagtctgcggcgatttgcgaagagctggcgaatttcgattatctctacctgagcgggattagcctggcgatcttaagcccgaccagccgcgaaaagctgctttccctgctgcgcgaatgccgcgccaacggcggaaaagtgattttcgacaataactatcgtccgcgcctgtgggccagcaaagaagagacacagcaggtgtaccaacaaatgctggaatgcacggatatcgccttcctgacgctggacgacgaagacgcgctgtggggtcaacagccggtggaagacgtcattgcgcgcacccataacgcgggcgtgaaagaagtggtggtgaaacgcggggcggattcttgcctggtgtccattgctggcgaagggttagtggatgttccggcggtgaaactgccgaaagaaaaagtgatcgataccaccgcagctggcgactctttcagtgccggttatctggcggtacgtctgacaggcggcagcgcggaagccgcggcgaaacgtgggcacctgaccgcaagtaccgttattcagtatcgcggcgcgattatcccgcgtgaggcgatgccagcgtaaacgcagcatatgcaaaaggctggataaagtgttacccctctatccagctcatccataaatacctgatggttgtgctaactcatcaccatcaggcattactgtgcaggtggaatatccgtcacttcaggatgtacgtcatccgtggcgacagaggtggtcgcagcggcggtagatggggccatgatttgatcccagaccgcctgcaacgctttcatgttaaattccggctcgcctttcggctgcagcagtattaacgccatatcattgctcaactgttgacgcagatcctgatttaacatctctaccgtcaggctattaaggaaatcctgccgcagtttctgatattgctccggcgcgatatcgacaacctgattttgcaagctacgcatccgctgacccatcagaatatcggtatcagctcgtgcataggcggcaaacagtttctgcagctccagtttcttttgcgccactaacgcattgaactcttcttccggcagacctttatcgcgaaccttcgccagttcacgcgccaccagattaaggttgctgttcagcttgtcgtttggactttcgatgttgatggcacactgcgcacgcagatacagcacacggcagtcaaatccaagaccgatgtctttgctgttactggcacttaacgcttgctgaacatgccagaacagcgcctcgcgggccaggtccgcacgccagtagcgcagcagtgcggcactttcacgaatcggctgccacggcgtatcccacatgatagataaccggtcctgacgcaccgcgtcagtcataatactcaccgcttccgcacgcagcggagaaagcgtcggcaccggagctggcgtttcacgtttgcctttcagttcgccaaacgttttgtttatttggtcgacaacgctgcgcgcatccacgtttcccaccaccagtagcgtcattgcatccggggtgtaccatttctgatagaaatctttaattttttccgcttcaacgggttgtttcagcggatcggcaggatcgtgacctaacaaggtactccctttcagacgatagcgccaccagccctctttagtatcggcaggccaggttgccaccatgtcctgactttgcagcgcgtggttgatggtttctggtgtgatggtcaatttgccagtggcatttgccagataagagagcgcttctttcagcaaatcgttacggttattgggcaaactcagattaaacagcgtggtgtcataagagacaattaccggcggcatcgggcgtttagggtcgatcccctgctgccacaaactacgcgcctgtgctgcgtcaaggccaccgctttgcgttagcgcaatacgagggatggcgtgactgtaaccgctctgttgtgtactttcggcgaggctaccggtattaaccagcaggcgaatttcaacacgatcgctgggacgctggggggtggtcagcacttgccactgtaaaccgttggaaagcgtcccctgttgccatgctggatcaggctggagcgcatctgcctgcacatagccagcagtggccatcatcagcaaaccgcccgctaaaagtcgaatttttgtgccctgcatgtgaacccctgatcaactatcctggtaataaaaaaactgcccgttgtcggtcagtctaaatgacgttaaaaacacttcgtgttagaccgcaagaacatgaaaatgtcacggaagaagtgaaataaacctgaactcacccaggtggtaagttcaggcacaggggtcaattatgcgcaaacacccgcactcggggaagggagtgcgggcataagtgatgagattaagaggataattcgtgcgttttgccatccggcgcacgattattcagcacatcgtccagttttttgtggtccagttctttcacccacttagcaacgacaatggtcgctacgccgttaccgaccaggttagtcagcgcacgagcttcactcataaagcggtcgataccgaggatcagcgccagacccgctaccggcaaatggcccaccgcagagagcgtcgccgccagcacgataaagccactacccgttacccctgccgcccctttagaagaaagcagcaacacgattaacagcgtgatttggtggacgatatccatctgactgttagtggcctgggcgataaacaccgccgccattgtcaggtatatgcttgtgccatcaaggttaaagctgtagcctgtcgggatgaccagccccaccacgcttttacggcagccgagtttctccatcttgtcgagcatacgcggcagcgcgctctcggaagaactagtccccagtacaatcagcagttcttcacggatgtagcggataaatttgaagatactgaaaccagtcgctttagcgatactacccaataccagcaccacaaacaggatacaggtaatgtagaaacagataatcagctgccccagttgcaccagtgtgccgacgccgtatttaccgatggtaaacgccattgccccgaacgcaccaataggtgccagacgcatgatcatattgatgatgccgaagatgacctggctgaaactttcgatgacgttaaaaatcagttggcctttgctgcccagacggtggagcgcaaaaccaaacagtacggcaaacagcagcacctgcagaatgttaccgctggcaaatgcgccaatgacgctcgccgggatgacatccataatgaaggcgacaatgccctggtctttcgcctgatcggcgtaaaccgctaccgctttcgcatcaagcgttgccggatcgacgttcattccggcaccaggctgcacgacgttaacgatgataagaccaataatcagcgcgatggtactgacaatttcaaagtaaagcagtgcgactgcgccggtacgaccgaccgccttcatgctttccatgcccgcaatgcccgttacgacggtacaaaagatgacaggagcgatgatcatcttaatgagcttaacgaagccgtcgccaagcggtttcatttgctcgcctatttcaggatagaaatggccaaggagaataccaatggctatcgctgtcaggacctgaaagtaaaggcttttaaacagagaggttttcatagggtgtcctttagtaaaaccacaggtcttgtaaggttatggggtacctgcggccttaaaataacacccagacaacatcacagaaatgtacctggatcataattgaaacaaaaaggttaaaaagtttgagctggctcgcacaaaccagcactttttaaagttttgtaatcagtttggggtagttacttttcttccaggtaactctcttcgaagatttcaatagggagtgggcgagcaaaaaggaagccctgggcaataccaacgcccgcttttgccagccagtcgcgttgtgcttcagtctccacgccttcggcaatcatttgtaagttcaggctctgcgccagcatgataattgcagcaatcatgctgctatctcccggcaagccttcaacaaacattttgtcgattttcagtacgtcgattggcaagcttttcatatgctgcagctgacgcagccctgcgtagcccatgccgaaatcatccagcgccacccgaactccggcattgcgcagcggacggaggattgccaccgcagcatgagggtcgtcaatacgtcggctttctgtcacttccagaatcagtgttcccggctgaatgcgatagcgggttaacagttccagcatatccgccaccatattcgggtgcatcagttgcagcgcagagaggtttacgctcaagggcagcataatgccgcgctcttgccaggctgcaagcaatcgacaggactcttccagcacccagtgaccgacggtaaccatcagcccacagcactcaatgcgatcgattaagccatccggcaggtcccaactgccatccggttgctggatacgcagtaacacttccgcactgaccagtttaccgctggtcatctcgacctgtggctgtaaccaaatagcaaactgatgattttccagtgcattaaggatatcgctctcttccgtcaaccgcttctgggcggcttccatctgctgcggatcaaagaactgaatctgattcttgcctttatggcgagcggtaaatgccgcagaaatagcgcgactgtaaagctgttcggcggtgagatcgccgtagaacatcgccacgccaatgctacagtgcggacggagttgaatacgttcaatcggcaggcgctcgctcatgatagtgagcacttgctgacctaaggtgattgcgtgccacggttcctgtacaccgttggcaatgacagcaaagtcataaccgctaatctgcgcgaggatcatacgtgggctcagtacgcttttgagtttttccaccagcgtcagcagcagaatttctcgttgcgcctctttcagcacgcccgcagtatcacgcagggtttcacaggtgatgatcatcagcgcggtggtttgtttacgcgcgacaacctgctccagcatctccatcagcaaggctttgttcggcaaatcgctcaccgggaagcgcatcgcattttcgttctgttcttcataatggcgctgcagcaattgctggttgaggttgtaactgcgcaccaacataccgatttcatcgtcctgatgcagacgcggtaatgccagttggtgaccaacaagctccttggctgggatggcgttaagttcgcgagcaatattgcgtaacggatgcaaaatcaggcggttaatgcaccagctgatggcgacggtcaggataaggctcaaaagtaagtaaatggtcactaacgtactgagggtgctcatcacgaacttatacatacggaaggaatccgcctgtagtaccagataggcaattggctgcgggtttgccggacgttcgaggctgtaaacgcccaggctgatttgaaccggtagctcaaacaggcgagtaaccattaccggcaccgggcgctctggaataaaacttttacgcagcgcctggaactggttaggcagcactacatcggcacggctgaccacgcctgccggtttaatgctggcaagaatagcttccgcttcgggaatatcgcctttcaaaatagcactagataagggttcgcggacagagcgagcaatgctttccagttgcgtagccgtgttatagcgattctgctggaccagatggaacagcaaaacggtgcaaaaaataaaaacgaacaccaggacaacggctgccaccattgccatctgcttgattgttaacgagcgacttacgcgcaaattgtctccccccggaaatcccagattgccgcccgagtatacccgatcgcagcggcattaagagaggcgctatctgaaaacttaccagtcggcgtaaggtatcagcggctgcggcggtaaatccatgtcaccctgccatccggcggcggaataacgtacgtagagcaggaaatggctgggtgcgtaatctttcgcctgctggatatcaattgccgtgccaacaaaccagttggaagtaacacgtcgttcaagtaatgcccgcgccgtgtagccgaagccctgactgctgccgccatcgttggattgccgcgcagcttcttcctgccagtcggtcgggatcagattcatcagcggataacgcggcatggttttggtgcgactatggctccagctgccagacgcacccagctcccagctccagttttccgtgcgctcccgccacatcaccggtatggcaaagctcaggtattcctgcggactgtagtaaccgccctgaccgagactgtagccactcagatctttgtcgtaatgccagatcatgttgttcaggccgattgtgacgcggcgattgttctggttaatgaccttatagtaatagcccgtcatccagcgcacgcgccagttatcttcgacatttttaccggttaactggtcgccactaaggcttgcccagacgccgtttgcttcacctttatcgtagctcagacttagccccacaccgtcggcacgtacgccaccccattttttcccggtattgctcggggagtctttttgcccaccaaaggccagcaaagaactggagatgggccgacggtgggcgttaacggtgtaacccagcggcccgatatcatcgctgtaactgatgccgccgaccacatccaccacgttgaagcccatcggcgtggtaccgatatcccagctccagacgtcatttcgccagccgaccgccacgctggcaccggaatcgctctggctgcggttgccgctacagtcctgtaatgtacaggtgccccagttgtcatcccatttgccatcggcattagtggagaaactgccgacgttcatattgacgaaatcactgcgaaagaacatccgcccgtcagaatacggcgcatccacctgcaacatggtagtgtgcgctttcagatcggagtaaccaccggtgccgctgctaccccagtaatcgtgctcaagggtgacgttaagatcctgctggcgatagaggtccgccgcatcgctgcgcacgccacgtttcagccagtcatctttctcgtcgttacgggtcagtcgggtaaaggtgtcgttatcctgcggacgcgtcgtagtcacaccggatgcgaccatggcgtctttgtaggtttccagcgcctgcgttggatcgcccgcctgcgcttcaaacttcgcaccatcacgcagcaccatcgcgctttccatgctcggtggctgagattttgcctgcgggatcaacttattaaacgtccgctgcgctgctgcggtatcgccaagctgcgcctgtgccagcgccacgcgccgctgtgtgttcaggctggcgttatcggtagcgggcagtttcgccagctggctacgtgccgccgctttgtcaccggcagcaatatccacttccgtcagaccaagaatggcgtcggcgttagctggctcccgcgtcaggacattctgatatgcagcgcgggcggcggtgtaatcacgtcgttgttgcgcccagtcagccagcgtgaggtcaatacgcgtggaaggtggttgctggcgcagcatcgcttccgcttctgcctctttgccgctttctcgcaggcggttagcggtttccagcacctgatcgctttgcagtcgattaaccagctcctgaatattgctgttccactgcgcacgcggcaggctattgatatgcgccagcgccgctctgtcctggtcatgaccagagaggtacagcccgtaagcgtaaacctgctccgggtcgttgctcttctgctgcgccagattgcgcattaacgtatcggcctggctgcgttgtccggcctgccagagatcctggctaagtcggtaagtaatccatacgctgccggggtccagcgccagtcgttgccgctgaagtgctgccgcctgcgcccatttgccctggttttccagtgcctctgcctgctgtgccagacggtcgttttgcaggctgcgttcgatatcatcaatgctacgccgctgactggcagagaggctggcgataaacgcttcagctttttctgggctttgctggcggtaaatatttgccagcccgcgcacggcgttagtgttgccgctgtccatacgcaaggtctgctgataataacgttcggcggcgggataatcttttcgcgccatcgccacatcgcccagccccagcactgcataactgtcggtgttatcgacattacgcgcctgctggaacaggcgttctgcccggtcaggattattggctttcagcgcagcatcgccctgctggatcgccagccagtagcggtttactttcagcagactgttccatttgtcgttgttgctgctgtgcgggtccagtgcgagggctttttccagattcgccactgcattggcgcgatcgcctttctgagaatacgcctggcccagcgcccccagagcttcactgtctttcgggttcgcccgcaccgcctgttgtagttcgggaatggctttacccgccataccagagtccaccgccgctaaaccttgcgcacgagcgcggaaagcaggatcggccagctgtttttgctgttctgccagttggctttgcgcagccgccacgctatcgccatcactaaagatgctgagatattttttcagcgcgctcacactggcatcactgacgggcatgtctttaatctgcccgtaccagattttagaggccccttcgcgcccggcgttgctttttgccatctgttccaggacggcaaaaccttcgtcacggcgatcgctactaaacagcaatagcgccagattgttttgcaggcccgtattgcccggtgcatccgcattgatgcgttttaactgattaatcgcttcgccacggcgagccggaattttcgccaccgtactccagtactcgacagcaatgtcaccttccggcggcgcaccgttgaacagtttgttgtaactcgccacagcttcttctgcatgaccggtcgtcgcctgcaatcgtgcctgttgcagtgcctgacgaccatccggcgtggaaagtagcatcgtagtccggctgcttttatacgcattactactcggcgctaactggctcagccgatcgagctgtttttgcgcgccatcaatatcgccctgacgtaacaaagaacggaaacgggcggcaacgacgtccgggttattcggatcaataagttccagccgatataagctctgttgcaccagatcttcacgatgggtcgcttcgcctaaccgaacttgctccagcaactgttgctgagcggttggtgctgcctcgaccatcggcatgacggccagaccgagggaaagcgtgaatatgtttagtgtgaatttgcgcattcctggccccagtcaggtaattactttagtgactatttgcgcattcctggccccagtcaggtaataactcaccttttgtgctgaagcggaaacggtgttgatcccagccttgtccaaacagggtcagcacatagttgtaataggcatcgctgccgggaaagttatcggccacgcgctggcgctgaacggcctgcgcatcgcggttttgtaaaaagggcagcatggcggcagaaaaaccgactggtcctttaccctgcgctttccccgtagccacatccactttttccggcggataaccgtttttctcagtgaatgtcgccatcggtttaaaccggttgagcatccgcgctttttgcggatcgctgtcaggcatcatgcctacccacatgtaaacgcggatagcgtcgtagctgctgatcaatgttttttcggcttttagctgccagcctttgtctttctcatagcgcacccagtctgggctaaaacctttcggggcggtttccagcaataaacgttgattggtttcgcgcagcgtggtccacggcgcgccaaagcgggtgaaatactgcgccagcgtcggcggcaggtagctggggttaaaacgccagctgttatcctcagcaaaacccactttgcccggtaacaacatggaacccagcccaggcaccgtcaccacttcctcccgcgcgatacgttttagcaacgcgctgccgatgtcggtataacgctgctctttccacaaacgccccgcctccagcaagctccaggccatccagacatcaccatcggaggcgctattgctgtccagcacttcccacttactgttctctttcttgccccacagccaggcgggcaaacgttcttttaaagaaccctgagcgagattgttctgcgtccagtcgagaatattatcgaaagctgcacggtcgttagccgccagggcagagaacatgccgtaactttgcccttcggaggtggtgattttgcgcgcgtcgctggggtcgatgacgcgcccttcctgactgatgtaatcctttttaaactgctcccaggcaggccaggtacaggctgcctgaacactaaaggcagccagcagcagcatcgtcacgattccactacgcaacacattcatcttcaattactcgttatccgggttaagacgacgacgactaataattcgcagcagacgccacagtacccatgccagcaatatcacactgatagccgccagcaccgccagcagaatcggatggtttgccagcgcataccacacgcgctcgaaccacggcagatgacctacgtaataaacgtcgccaacacgtaggctgttgataccggactcgcggatcaccgcgacgctaccgaacatggtggcgcgtttgccgctatcgttcaccgcatcgttaagcatttcataaccgcgtgggctatctgccaacagcgcaatcacgctgcgctggtcgttatacgggctctggaagccaatcaccgccgccatcgcaccggaagaggtcagcgtactccgggtttctgccgcgcgatcgctctcgtccggcacaatgccggggaacggggtctggcgcatcggtgttttcacccagctttcggtcgcctgcaccaataggtcgatctgcttatcgtctttcagtttgtccgggataccaccgatgatcatgatgtcggcatctttgccctgaatggtgctgccatcatcggtcaccgtcagattaatcgccgggaagcccgtctgtgcgccgataaaaccaacagtattcagcaacgtttccatctgtgcttcgttaggcgctttcggcatcacggtgatggtttggctcagatccgccatccggctgaatgggaagcccgcgttagcaaaggcgcgtagatccggcatcgggatgaagtggtaatacttgctgaagtcgatggtggagtcgtcaccaatcaccacatgattctgcaccggctggaaggtaatacagttatccacgctaccgcccggcatcgggttcatatactcaaagtcgaagcgcagctggttggtcgcgcccagtttcagcgccggaatagagacatctgttttgccatccagcaaaccttgtaataccggaatccgcagcagcaggcggttcgcctcctgtttgctgctcaggttgaaggattgcaggaactggttattcaggctgatatccatccggctactgtctttcaccggcggcatggtgtagcggtaattaatatccatatcaatgccggtactgcgcatcaggtagagatccggcggcaggtttaggctaacgttaatcgctgctggctcaagaccgctggattgtaactgttcttcataggttttcagttcgccaaatgtgaccggacgatcggtacgtacccagttcggcgcatcgtacggcttacgcggtagcagcggtttcacttcattcactaccacgctttcaccacggaacagaatgttaccctgagcgatacctttcgctgcctgcaacaggtctttgtcgtcacgaccaaacaccaccagcagtttgacgtaaggattctgcggatggttaatcatctcaatcaccggggcttttaccgccggatgatcgcgcaggaagtccggccgtttgtcgttggttgcaaagacaatggcattgcgatccggcagttggttatagagtaccgggaagttctgcccacgccagccagaacggctaccaaaccagctggcgacaatggcagaggcttgttgcagcccaacatccggcgcacccgcaaagaccatcggcaaggtgttggtgcggttatcgctcgggtcaaagaatggcaccgggaagtgactcaggtcattcttcacattcagggtctgataggtcagatccagtccactgctccgcccaacatccagccaaagcgtggtgctggccggtttttcgcacacgtcctgataatggccgacaaactccagccgtacacggttgaagtcgctaataaacagtgggttaatgggcatttgcgccagcgtttttttacccaactgttctttggtcactggcagcacgcccatcagttcatcattgagataaacctttaactggctctggacaggcagtaagcttgggcttggggtgtattcgaggttgagcatcgccttcgtcaccacttcatcgctgcgcataccaaactcaatgctgccgttcgggttaatgccacgtagcaccatgctgcccggcggcggtgcaatttgcgcaaaggtcagcttcacatcacggctaggaccgttctgcgccacgactggcgcatcagcgccctgcacgcccggcatcacttgccccacctgcggattttgttccgtctgggcggctacagctggctcagcattgatcagtggttgcgttgctggcgtcgcctgcgtcatgaaagaggggaacgcactcatccccatagccactgcacaaatccagaatagttttcttttcatcgcgttatcatcattgttgagccaaagcctgatcgcttggttgtgccgtttcgctccgctccgggcggcgcggaataaagcttacaacccaggaaaccagagaagtcagcacacggaatatgcccttcacgctagaaggcgcaaactccgccagatggcggtagccacggaagccgagcttcagaatatccagcagactttccagcggcttatcttccgggtagctgtcctgccagagcgcccatgtatccgcacgggcaaacgtacactgcacaaaatcgatatgttgctgggtggtgagcggcattaatttcagcccaacttcattacccatcacgcgcgccacctgggtcgggaagacgtattcctgctgaccgcgtttaagcaacagattcactttctgcccttccagaatctgcgcctgaccgttgatcttgatccccaaaccaccgtcggagaaatcctgaacggtacagctgaagaggtgaccatcttcgcgggcaattgccgcgggcatcgtcatctccacgcggtggcttcggcgtacctgtttgctttctacgcttaccgcaactgcgccgccaagaacaatcaggttgtagaacacccacaccatactgacgaccacggtgagcatctcggttggcgggccatagaagtagcgccagatgcctaccgcaacgcccaccaggttgagcaggacaaggaagatgtagggccggctgatcacccagtcgacgtactcttcttccaccagtccacctttggcggtgacgttaaatttgcctttgtgcgggttaatcagcgccaccagcgtcggtggtgcgatataccacgccagcaccgtttcgtagatttcactccagaaagagtggcgatatttgccctggatcttggagttggtcaggctggcatggatcatatgcggcagcacgaatagggcgatcatcaacgctggcgcatagatgatgtaggcatgaagcagcaggaacgccagcggcgcagtcaggaagatcagccgtggaatgccgctcaagaagtggaacatggcgttgacgtaacatagccgctgagcaaacttcagccctttaccggtgagcgggttatcgagacggaagatttgtaccatcccgcgcgcccagcgaatacgctgaccgatatgcgcgctcagactttcggtcgccagccccgccgcctgcggaatacgcatatacgcggaggtatagccacgacggtgcaaccgcagagaagtatgcgcatcttcagtcacggtttcgacagcaatgccgccaatttcatccagcggcttacgacgaatcaccgcacaggaaccgcagaagaaagtggcgtcccacatatcgttgccatcctgcaccagaccatagaacagcgtgccttcgttcggcgttttacggaaacgccccaggttgcgttcaaacgggtccggactgaagaagtggtgcggcgtctgcatcatcgccagctgtttttctttcaggaaccagcccatggtcatttgcaagaagcttcgcgttggtacgtggtcgcagtcgaaaatgctcacgaactcgcctttggcatatttcagcgcattgttgatgttgcctgctttcgcatgttcatgagtggtgcgggcgatatatttcacccccacgttttgcgcaaactggcgaaactcttccctgccgccgtcatcaaggatccagatattcagcttatctttcggccagtcgatacccaggctggcgtaaatggtatttttcaccacgttgagatcttcgttgtaagtcgggacaaagatatccacgctcggccacaggctcatatctttcggcaatggcaccggctgacgattcagcggccatactacctggaagtagccgagcaccagcacaatccacgcgtacgtttcagcgaagagcagaataagcccgcacaccaggctgaccggatcgtcccagttcagcgtagaggtgtaacgccaccagatataacggcaagaaacggtcaggctcagcacaatcaacattagcgcgctgaagcgccccggcatccgccgtacgatcagcgctaccccccacagcagcatcaggaagataaactgcgccagcgggttaaacggctgagtaacgcagattaacgccagaatcaggctgaaggtgacgatgataccgaggatcaaccgccgcgccccggcactcaaatgaccgagctcttttttctcatccagatgctgtgttttatggctaacgcgctcaggcagctcgttcatccattgatggtaacgtccacgaatattttgcagaccactaaatgcccgcctgcgcggtttcggcgtttctttgcggcttgcaccgatcaataaccagcatgtttgaatgagataacggaccgggtccagcggacgcggacggctggcgttgatatgcggatacaggtttttatgttctgcgcgaatacgctgccagcgcgggtgctccagcggaataaaaatccaggccaggatcatccagaaacagccgagcgtcgcgctgaaagcgctcgcaccgtgacgacgataatcgcgataacgcccgataagccgcgcgttgaccggcgggataagcaaccaccgggtcaggatactcatgatgcactcccgactggcgtttacatcaacttgcactcccgactggcgttttcagcccggagtagttcaacaggcaccagttcgccagcgtcagtatctcttcagccgccagcgcatcactgcgatattcacctactggttgcttagccgccaggcattcagccatcgcttcatcacgatgaatgagcatcggcagtaatcggcgctggctttgcaaccaaagctggtaaatatcgtcctgaacctgactgccaatacggaagtcattaatcaaaatatgtgcgccatccggcagcgcttgctgatgcagtcggatatggcagttggcatccacattgacgattgccaggctgtgatcgcacaaactcagcagctggtgggttatctggctggcatcacgcggtaagtcgattaaaatccactggtaacgcccgctggcttttagttgctgtaagccggagcaaatatcgctcagccgggtttgccagtgctgtggattttcttgttcttcaatggataactgaccaaaaggcagcaaatcgagctggctggtgtagcgcaacccagcgtcacgccagtcctggccatccagcatcgctctggcccagccctgacggtgggtaaaatcaacattaaaactcaggcgcaacaagttgtccgggcaggcatcgaccaccaggacattttctcccaacatttgtaaactccaggctaatgcggcggtgatggttgttgtccccacgcctccccgcaccccctgctatcccagtacggccattcaccaatcccttacttttgttgcgcaaactctgccagcaacggccagcgttttaatgccgcggccaactgttcgcgttgggaaatatcggcataatcaatatcaggcagactaaatgcctgctttaacgccacaatatcattctggaagatatagcctatcgcgggatcaggcagagtatctggttcattgttattcattttgcttgatccctatgaaataaccgtaccgttcatgagacaattctaaccgtgagcatttcgccggtttattgtttacggcgagacgggaatttgctcactttttgactttccgttacgcaacagaaaaagttaaaaacgaaaagactaaaatcacacgtcttgtgaccttctaaattgattcacatgctaaatctgataagttttaatttcaatggtaggtttatttcttagctttcgctagtaaactgataatcagacaaaatggtgacatgagggacattgtggaccctgtattctctatcggtatcagtagtttatgggatgagctgcgacatatgccagcaggcggcgtctggtggtttaacgtcgatcgccatgaagatgctatcagtctggcgaatcaaacaattgcatcccaggctgaaaccgcacacgtcgcggtcattagcatggacagcgatccggcgaaaatctttcaattagatgattctcaagggccggaaaaaataaaattatttagtatgctaaatcatgaaaaaggtctatactatttgacccgtgatttgcagtgttctattgatccccataattacctttttattcttgtttgcgcaaataacgcatggcaaaacattcctgccgagcggcttcgcagttggttggataaaatgaataaatggagcaggttaaaccattgtagccttttggtaattaatcccggaaataataacgataaacaatttagtttgttgcttgaggaataccgtagtctttttggtcttgccagtttgcgttttcagggtgaccaacatttgctggatattgccttctggtgcaacgaaaaaggggtcagcgcccgtcagcagcttagcgttcagcaacaaaatggtatctggacattagttcaaagcgaagaggcggagatccaaccacgcagcgacgaaaaacgcattctgagtaatgttgctgtactggaaggtgcgccgccgctaagcgaacactggcaactgttcaacaataacgaagtcctgttcaatgaagcccgtaccgctcaggcggcgacggtggtcttttctttacagcaaaatgcgcaaatcgagccactggcccgcagcattcataccctgcgtcgccagcgcggtagtgcgatgaaaatcctcgtgcgggaaaataccgctagcctgcgcgccaccgatgaacgtttgttattggcctgcggtgcaaatatggttattccgtggaatgcgccactctcccgttgtctgacgatgatcgaaagcgtgcaagggcagaagtttagtcgctatgtgccggaagatatcactaccttgctgagtatgacccagccgctcaaactgcgtggtttccagaagtgggatgtgttctgtaatgccgtcaacaacatgatgaataaccctctattacctgcccacggtaaaggcgttctggttgccctacgtccggtaccgggtatccgcgttgaacaagccctgacgctgtgtcgccctaaccgtaccggcgatatcatgaccattggcggtaatcggctggtgctgtttctcagtttctgtcggattaacgatctggataccgcgttgaatcatattttcccattgcctactggcgacattttcagtaaccgtatggtctggtttgaagatgatcaaatcagtgccgagctggtgcagatgcgcttgcttgccccagaacaatggggcatgccgctgcctttaacgcaaagttctaaaccggtcatcaatgccgagcacgatggtcgccactggcgacgaataccagaacccatgcgactgttagatgatgctgtggagcgcagtagttgatataagatgctgtggagcgctcatcatgatgaccatcagcgatatcattgaaattattgtcgtttgcgcactgatatttttcccgctgggctatctggcgcggcactctttgcgacgcattcgcgacaccttacgtttgttctttgctaaacctcgttatgttaaaccggccgggacgttacgccgcacggaaaaagccagggcaaccaaaaaatgactcaatttacgcaaaataccgccatgccttcttccctctggcaatactggcgcggcctttccggctggaacttctattttctggttaagttcggcctgttgtgggcgggatatcttaacttccatccgctcctcaatttggtgtttgccgcgtttctgctgatgccccttccgcgctacagcctgcatcgcttgcgccactggattgccctgccgatcggctttgctttgttctggcatgacacctggttgcctggcccggaaagcataatgagccagggtagccaggtggcggggttcagtaccgattatttaatcgaccttgtcacacgctttattaactggcagatgattggggccatttttgttttattagtggcctggttattcctgagtcaatggattcgcattaccgtttttgtggttgccatactgctatggctgaacgtacttaccctggcgggaccaagtttctccttgtggccagccggacaaccgacgaccactgtaacaacgacgggtggtaacgcagcggcaaccgttgcggcgacgggtggcgcaccggtagtgggtgatatgcccgcacaaactgcaccgccaacaacggcgaaccttaacgcctggctgaataatttctataacgcggaggcgaaacgtaaaagcaccttcccgtctagcctgcccgctgatgctcagccatttgaactactggtgattaacatctgtagcctttcctggagcgatatagaagccgccgggttgatgagccatccactgtggagccatttcgatattgagttcaagaactttaactccgccacctcctacagtggcccggcggcgatccgtttactgcgcgccagctgcgggcagactagccacactaatctgtatcaaccggcaaataacgactgctatctgtttgataaccttagcaaactgggctttacccagcacctgatgatgggacataacggccagttcggcggttttttgaaagaagttcgcgaaaatggcggcatgcagagcgaattgatggatcaaacaaatctgccggttattttgctgggctttgatggtagcccggtttatgacgataccgctgtgcttaaccgctggctggacgttaccgaaaaagataaaaacagccgtagtgccacgttctacaacacgcttccactgcatgacggcaaccattatccgggggtcagcaaaacagcggattacaaagcgcgggcgcagaaattctttgatgaactggacgccttctttactgaacttgagaaaagcggtcgtaaagtgatggtggtcgtggtgccggaacacggcggcgcgctgaagggcgacagaatgcaggtatctggcctacgtgatatccctagcccgtctatcaccgacgtccccgttggggtgaaattcttcggcatgaaggcaccgcatcagggggcaccgattgtcatcgaacaaccgagcagcttcctggctatctccgatctggtggttcgcgttctcgatggcaagattttcaccgaagacaatgttgactggaaaaaactcaccagtgggttgccacaaacagcaccggtctccgagaacagtaatgcagtagttattcaataccaggataaaccgtacgttcgcctgaacggcggcgactgggtgccttacccgcagtaagaacgaaaaaggccgcagagtttcccccctgcggcctggtccgggcgcaaattgccattacggcagcctgacgcccgcatgacacgttacttccgcttgttcagccagttcacgatcatactggcaagaatgccagcaatgaccggagccgctaaatcatgccagaaggccatgcccagctctgcgaacgtcatatagccgcctgtgttgtaatgacaacgtttcgcggctattcttgagtggtctagagtcaagattagcccccgtggtgttgtcaggtgcatacctgcaacgtgcgggggttttctctctccagcaaccaatgccaccagggataaagcccccgcaacattgcgcctcaccggaacctttccggcttgccgctgattctacgattgctttttactgtcagcacccggcaatcttcctcattgcgcgatgccttccagcttaatttctttatttgcaatagttgcagttcatatccgggctgactccagactggtagtgaaatgcgcaattttgtagaattgcgcctcctcgcgacctccccagtgaatctgttgcctcattttttacatactgcgtattcgacttctccacctgttgcgcaagagaaactgggtttattcatttttgcgaggccgacttctttctggacaggactttatgcagcacaacacactaagcaaacacaatcagaaattgccgtttacacgctacgacttcggctgggttttattatgcataggcatggcgattggtgccggaaccgtgctgatgccagtacaaattggcttgaagggaatttgggtatttattaccgcagcgatcattgcttatcctgccacctgggtagtgcaggacatttatttaaaaaccctttctgaaagcgattcctgtaatgactacaccgatattatcagtcattacctggggaagaactggggaattttcctcggggttatctactttttgatgattatccacgggatttttatctactctctctccgtggttttcgacagcgccagctacctgaaaaccttcggtttaaccgatgccgatcttagtcaatctctactttataaagtcgctattttcgccgtactggtggcgattgcgtctggtggtgaacgattactgtttaagatttccgggccaatggtggtggtcaaagtagggattattgtcgtgttcggttttgcgatgatcccgcactggaatttcgccaatataaccgccttcccgcaagcctccgtctttttccgcgatgtcttgcttaccattccattttgcttcttttctgcagtatttattcaggtacttaacccaatgaatattgcctatcgtaaacgggaagcggataaagtactggcaacccggctcgcgctgcgtacccaccgaattagttatatcacgctcatcgcggtgatcctgttttttgcctttagctttaccttcagtattagccacgaagaagccgtttctgcctttgaacaaaatatcagtgcactggcgctggccgcgcaggtgatccctgggcatatcattcatatcacctctacggtgcttaatatctttgccgtactgaccgcattctttggcatttatctcggtttccacgaggccattaaaggcattattctcaatctgttaagccgaattattgataccaagaaaattaacagtcgcgtgctgactctggcgatctgcgcttttatcgtcattacgttgacgatttgggttagctttcgtgtaagcgtgctggtgttctttcagttgggaagcccgttatatggtattgtgagctgcctcattccgtttttcctgatctataaagtcgcacaactggaaaaacttcgcggatttaaagcctggctgattctgctgtacggcattttgctatgcttgagcccactgttgaagctgattgagtaaaccggagcgcatggccccggttttgtgagttaacgctgcggattttcatcctgatcaacagcaaaacaagctaccagttgaccgccgtagtcttttagctgcggctgcaactgggtgcaggggccgaagcgccgacgacagcgggcgttgaaggcgcaacccggcggtggattcagtgggcttggtagttcaccgctgagcttgatgcgctcgcggcgatcgtccgggttcaggcgcggcgtcgcggaaagtagcgcctgagtgtacggatggcgcgggttattgaagatttggtctttcgttcccttctccacgcagcggcccaggtacatcaccatcacttcatcagcaatgtgctccaccacgctcaggtcgtgggagataaagacataagacagccccaactcctgctgcaaatccatcatcagattcagcacctgcgcgcgcacactaacatccagcgcggaaaccggttcatcggcaatcaccacatccgggtcgagcatcagaccacgggcgatggcgatacgctgacgctgaccgccggagaacatatgcggatagcggtcatagtgctcggttttcaggccgactttcgccatcatgctcagggctttttcccgacgctgttctttgcttaagctggtgttgatcagcagcggctcttcaagaatttgcccgacttttttacgcggattcaggctaccgtaagggttctggaagacgatctggattttctgccgacgcagcttctgcgcctgcggatcgtgcttaagcagatcctgcccctggtaatacagctcgccaccggtgggcatttcaatcatcgtcagcaaccgaccgagggtgcttttaccgcagccagattcgcccactactgccagcgttttgccacgttcaaggttaaagctaacgccatccagcgctttaaccagacgttccggcgcgaacatgcctttcttcaccggataatgttttttcaggtcgatagcctgcaacagcggttgttgcagggtggcctcttgcgtactcatagtgtcggcctcccggcatcatcaagtgggtaatggcatttggactgacgcccgtcagcgagcatattcagcgccggttcttcagcgcgacatctgtcagtggcataggggcagcgcgggttaagcaggcagccgttcgggcggtcgtacttgccgggaacgacacctggcaagctcgccagacgttctttgtcctgagcaaattctggcagcgcacgcagcaatgcctgagtatacgggtgacgcggcgcatggaagatggcgtgcgcatcaccggtttccaccacctggcctgcatacatcacgatgattttatgtgccgcttccgccaccagcgccaggtcatgggtaattaacaccagcgccatgttctctttctgctgtagctccagcagtagttcgatgatttgcgcctgaatggtcacgtccagcgcggtggtcggttcatcggcaatcagcagttttggccgacaggcaatcgccatggcgatcatcacgcgctggctcatgccgccggaaagctgatgcgggtaaacatccagacggcttgccggatcgggaataccgacctgattcagcaggtcaatcgctcgctgacggcgggtacttttgttgccgccctgatgcaccttaatcgcttccataatctggaaacccacggtgtagcacgggttaaggctggtcatcgggtcctggaagatcatcgccacttcggcacccaccaggttgcggcgctctttttcactgatacgctgcaaatcctggccgttaaactccagtttttctgccattacgcggcccggataatcaatcagccccataatcgccagactactgacgctcttaccggagccggactcacccacaatcccgaccacttcgccctgttttacgctgtagctgatgcggtctacggcgcggaacggcgcgctttcgtcgccgaaatgcacgcttaatttatctacatttaataacgccatctcgaacctcttactgcttcagtttgggatcgagcgcgtcacgcagaccgtcacccatcaggttaaatgccagcaccgtcagcaggatcgccagacccgggaaggtcacgacccaccaggcgctttgcgcgaactgcaacacgtcggagagcatggtgccccactcaggcgttggcggctgtgcccccatgccgaggaaaccaagagcagccatatcgagaatggcgttagagaaaccgaggctcgcctgaacaatcagcggcgcaaggcagttcgggaagatgttaataaacatctgacgcatcgccccggcacccgccacgcgagacgcggtgacgtaatcgcggttaacttccaccagcacggcggcgcgggttaagcgcacatagtgcggcaaggcaacgaaggtcagtgccagcgcggcgttaccaatgctcgggccgaaaattgccaccagcaccagcgccagcagcagacttggcagcgccagcatgatatcgaccacgcgcataatgatgttatcgaccaggccgccaaagtaaccggcgatcaggccgagaataacgcccataatcaggcttaacacaactaccagacagccaaccagcaggctcaggcgcgcaccgtacatcaggcggctcagcacatcacggcctacgtcatcggtgcccagcaagtgcgccatgctgccgccttcctgccaggctggcggggcgagcagtgcatcgcggaactgttccgccgggttatagggtgcaatccagttggcaaagatcgcgatgaacagcacgatgacgacgtaaaccagcccgacgaccgcgcctttgttgcgtttaaaatagtgccagaactcctgtaacggggtcatcggcaccggtgcgctaatcactttattttcagtaacctgactcatgatgtccccttacttcttatgacgaatacgcgggttcaccacgccgtacagcagatcgaccagcaagttgacgaggataatcatcgtcgccaccagcaatacgccgccctgcactaccggatagtcgcggcgttgcagtgcgtcaatcaaccagcgtcccagaccgggccagctgaagatggtttcggtcagaatcgcccccgccagcaatgttcccacctgcaggccgataacggtcaccaccggcagcatcgcgttacgcagcgcatggacgataatcacccgcatgcgggttagccctttggcgcgcgcggtgcggatgtaatcctcgcccagcacttccagcatgctggagcgtgtcatacgcacaatgaccgccagcggaatagtacccagcacaatggcaggcaagatcatatgggcgacggcatcgataaagttgccgtcttcaccccagatggcggtgtcgattagcataaaaccggttaacggattggagtcatcgaggaacaccatatcgctcacgcgaccggagacgggcgtcaggttccagtgcacgctaaccagcatgatcagcatcatgccccaccagaagataggcatactataacctgtcagcgccaggccaaccgctgtgtgatcgaaaatggaaccgcgtttaaccgcagccagcacgccgaccggaataccgactgccgtagcaaaaatcatcgcgcagacgccaagttccagcgtggcctggaagcgcggcacgaactcttcccaaaccgggatgcggcttttcatactaatgcctagatcgccatgcataacgccccaaatgtaatggagatactgctgccacatcggtttatctaagccgagttcagccagcagctgcgcgtgacgctctggggagatcccacgttcgcccgccatgatcatcaccggatcgcccgggatcatgtggacaaaggcaaatgtgagaagggtaataccgataaacgtggggatgacgagtcccaaacgtcggagaataaactgcaacataacccggattctctatagtgacccgcagcctggaactgcgtgtctgtattgctcacaaatcaattcccgcccttatcggacagggaatgaagtattgctgccggatggcgctgcacgcagaggcacagcgccaccgggtatacagattgttgacaaagtgcgctttgtttatgccggatgcggcgttaacgccttatccggcctacaaaatcgtgcaaattcaatacattgcagaattttcgtaggcctgataagcggagcgcatcaggcatttttgcctttgccatcagtcttgtatggcttttaattattcgatagagacgttttcgaagtgatgtttgcctaatggatcaaccacatagcctttaacttctttacgtaccggttcaaacacggtggagtgagcgatgatcagtgccggagcctgatcgtgcatcaccacctgcgcttgtttgtacagttcaacgcgtttattgtggtcgtcggtagcacgcgccggttgaatcagatcttcaaacggtttgtagcaccatttactgtagttggagccttgttcagaggcggcgcagctgaacagggtggcgaagaagttatccggatccccgttatcgccagtccagcccatcattaccgtctggtgctcgccatctttcgcacgcttgaggtactcaccccattcgtaggtgacaattttggcctgcacgccgactttcgcccagtctgcctgaatcatctccgccatgcggcgagcgttcgggttatacggacgttgtaccggcatcgcccacaggtcgatggagaaacctttttccagacccgcttctttcagcaaggctttcgctttttcaggatcgtaggtgtagtcctgaacgtcgtcgttatagccccacatggttggcgggatcaggtttttcgcacttacgcccgcgccctgataaaccgctttgatgatcgcgtctttgttcaccgcgtaggtcagagcctggcgaactttcacgtcatcgagtggttttttctgcacgttatagctgagataaccgacgttcagccccggcatttccatcagattgatggatttatcctgcttcatgcgagcgatatctgccgggttcgggtacggcatcacctggcattcattcttctgcaatttcgcgtaacgcacggaagcgtcaggggtaatagagaaaaccagcgtatcgatctgcggtttggtgccccagtagccatcaaacgctttgtagcggatacgggaatctttttgatactgctgtaactggaacggaccggttccgattgggttgaggtccagtttttccggtgtaccggctttcatcatcgcatcagcatattctttactcagaatagaggcgaagtccattgccaggtcagcgaggaacggcgcttccgggcgagtcagcacaaactgaacggtgttgtcgtccacctttttcacttcactgatcagctctggcaagcccatgccttcgaagtattcgtagctgccgccagaaactttatggtacgggttttgcgcgtttttctgacgatcgaagctgaacaccacatcatcggcgttcagttcacgcgtcggtttgaattctttattgtcgtgccacttcacacctttacgcagatggaaggtataggttttaccgtcttcgctgacttcccacttttcagcgaggcccgggatcacttcggtggtgccgattttaaattcaaccagacggttataaagcgggacggaagaggcgtcataggtggtgccggaggtaaacagctgcgggttaaacccttccggagatccttcactgcaataaaccagagttttagcctgaacacttgctgcgacggtcatagccaccaggctgagaccaagcttcagcatcccactctttttcaaggaaatacgcattattctgctccaattgtgatgtttgttgttttaaccctttgcagtgggttgtcgctgcctgaccttttttgttttttgcccggtcgggtcaacgttatgaggtggggatgccgtactaattaacatcagtgtaacagtgcggatcctccataaaatgcccctcgtgacctacaatctgtcaacagaatgtgaaaacgtcaatacagccaaccgggatttacaccaacggtgagaatccacacacaaagattaaaaaaacttcaaacagctatttgcagcagagaaatttgtgctactccaacatgaccagaacaatcagcttaatatttagcaacatttggtgattaagttttatgcatttaatgaaaaaaatctgaggaaaaggtggatatctgagcgattaataccatgaacgctaaaacgcacagcggaaaatgccagggccagccataagtaacgcaaaaaaagatttaagcaaatataaaaaaagacaatggtttctgtcacaaatccgttaatggatagtgagatatggggcgcaaatttggcagggaaatgtgtgtcgtgtaggtcgaataaggcggtcgcgccgcatccgacaatggccggcacatttgcctgatgcgacgctgacgcgtcttatcaggcctacgtcgagtcgaacctccctgcccccggaggttctcatcctcatgagctgcagatgcaaaaaagcctgctcgttgagcaggcttttcgaatttggtcggtgatagaggattactcgccacttcgtggctcgccctgcgggccgttgctggcgcaacgttctctcgcttcgctcgagtcgaacctccctgcccccggaggttctcatcctcatgagctgcagatgcaaaaaagcctgctcgttgagcaggcttttcgaatttggtcggtgatagaggattcgaacctccgaccccttcgtcccgaacgaagtgcgctaccaggctgcgccaatcaccgaatgcggggcgcatcttactgcgcagatacgccctcgtcaatcccttaatagcaaaatgccttttgatcggcgagaaagtcagcaggccgcttagttagccgctgcctcttttgcctgcgggatgtgacaccagttgttgttttcgttaattccaccatccggactagtatagccaagacaacccatgatggtatcgtacagctctacgtgacggcgtggcactttcatgtcggcttcttttttcagctgcgcaaacgcctgcgcattggccggattttccagatatttatcactcatccagaccatcatcggtacgcggaactgctccggcggtgccagttcacgcggcgtgccgtgcaggtgctcgcgttcattaatactctcaccgtggtcagctgcgtagaacacaatcgctttcttatcgcgaacctgatcaatcacgctggagataaagtgatccacataggtcacgctgttgtcataggagttgatcatctgcgctttggtacagccgctatcaacaccaatacattccggcttccactgcgcgaagctacgcggataacgctgggtgtagttaaaatggctacctttggtatgcagaatgatcagatgcttaccatccgggttgcgccctaggctttgctgcatttcgtctaccagcaacatatcatctaccggcttgccacgattacgtggctccgcaccaatctgctcacgataagcaatgttgtccgccatcgtgttgctgtagaaccacatttcgctctgcatagcgtagaggtcagaactgaatcctaactgcttcagaaccgcgaaaatgttctgttcttttaatgtgcgctgcggattatcttccgcgcccccctgacgtacaaacatgcaacgcagactgagtttggttgcggtatcacaggagtaaccacggaacgccgccagatttttctcctgggccagtttcggcgtggtattacgctcatagccgaaaatacccatatggtcccaacgcgtggtttcaccgatgataaacacgacataagtgtcatcaacgttttgcggtgcctgataagtgaatttcttcgccggattaagcaaactattattatcggaagattcatcgacccgcgcccaggcatacagccccaacgcagaaagccagttacttggcagataagagttcgctacgacaccgccataactcggcaaatcaacgccggtcgccctctccactttcttctgctggatatccagcaaacgaatcggtgcccaaaccataatacccgccagtacgacgaccgccaggctgcgaatacgctgccctggggttcgcagttgtcggagcaaggtgtagcgacagcggttattccagataaggataagaggcaatgcactaacggcgattaaccagagaataaagttcagaccaacaacttctttactcaggtcgatatcggtggtcatgacggaagcgatgatgccataaccaatgaccacattaaggaaggtcatgtaatagctggcacctgcggaaaagagcaccaccaggcttgccagaatacgccagctgcggcggccaaacaggctaagaagacgtagtaaaaagaaggtcaccagtacggtggcggccagttcaacaacagcagaaatgcctttccagacggtaaaatcgtgcgcatagctgccgaagcggcggtaaaaaaccgcgccattcataaaaaggccaatatagattgcaagcaaaaagctcagcttctgctgtgtaatgcttttgatgtatctcatgcaaacaaaccctggacaaacaggtgataacaccctgcttagtggcttttcaggcccggcagggaaaaagtgcggaggtagtcagataagtaaaatctacacgcgcgaataagtagaccacagcaaagggaaaaagtgtggggaaagagtgtgcatgaagcacaaatttacaaaaatgcaagtttgaaaagagactttagcgttacaaaaagcagtaaaaagggccagttaattggcccaaattttacgagtcattgtttatacatttcgttgatgcgtttgatgcacacggaagctgaagcccagtagctcgcggctgagcattaaagggagccatgcgcctcacgcaacattttctgctctggctgacgaatcgtcgtagaaagcgccaaactcagaatcagcagggcgaaaatcacgtagaaggtcacatagaagccgccaaacagactggcgataatgctaccacaaatgctaccgataccgaaaccgagataaatcacaccgtagtttttcgccaggttattgaggccaaagaactcactgaccagactcggaaagacggtaatagtgccgccaaagttaaatgccacgcaggcaatcgctgcaaagaacgtcactgcattcaatggtgcaaacagcagggccgccatacccaccaggcttatcacctgaccaatggtaataacacggatacgggcgattttgtcagacagaatacccagcaccagacgaccactaaggttggcgatggaaataacagtgactgcattggctgcggaaaccacatcaaggtgtgccagactttgggcgatatctttcgctaccccaatcacgtacaggccgctcatgcaggcggtcaggaacattaccgctaacatccagtactgcggtttacgcatgctctctgccagcgtgtaatctttctccaccacaccattgctggttttcacttcctgttttggtgcgtctttcattaacgttgcgccgaaaacaatcatcaacagcgcaatcgctccccaaatcacaaaggttttttccagaccgaccgtttccagcagctgcgtgtcgataaatttgaaacccaggctacccagaccataagaaccgatagcgaacgcggagatcagacctttacgctccgggaaccacttcacacagttagagagcgtcagcagataacccgcgccatctgccagtcccaccagcacaccggcgcttaaccacagcatcatcaggttgtcagaatgcgctgtcaggaagaagcctaatcccagcaaaatgccggaagccatggtgacgcgtttaacgccaaaacgttcctgtaatttgcccgcaacagaagagctaattgccagccccagacttaacaagccgaaagagaaagcgacctggcttaccggcgcatccagcttggcggaaagcgcgccattaaacaggctccaggtataaacgctccccagcgcaaactgggtaatgatagtaccgatgagtgtcagccagcgggtacgctgataattactaggtgtcatggcagtattcctgcagtaataaaaaggaaaaatctctgccgacaaccataacgaagtgcactttatgcctggggaaaaacggcatgaaatgccatcagaacggaatgaaatgccttagttcaggaatgaatgacgcgacaattattcaccaaatttattatttggtaagttagcacccactatcgccacaactattgttatttaatggtttcaattgtgactgttacgttaaaatctggcgctaacccccatcgtatacagatagtcgctattattagtggtattttctgcctgagttagcgcggcataggcggcaatattttgattgagcaacatatcagcgcctacggtgacatccagccagttgccgttctggtttgtcgccgtcatccggctcaggccactttgcgccttccagatattctcgccaaattgctggttatagctgatttgcgcccagggtcggagatcgccaagccgggagtcaacacgccagcctaaggtactcacgctggcatgccataacggatcggtcagcgtggtagtactgtcgccaaactcgttatacatgctggtggttgtgccatcgtaatgtaatgccgcgaccgggccggttgtaacctgttcatataaaggaaaattccagcccatactcatactgctggtcacatccacaggggtttcttccgccagattgacttccagtcccagcgccctttggctactttgaatacgttggctcaaaatatcgttgtaatcaggttgatgatcactatcccaggtgtaacgctctgtggaaagtccgggttgcgtatcaacgatatattcttgttgccaggcgtaagctgtgttgagaaaaaaggcactgattaccacgctcgccagcaggcttagctgccagcgaccaccgcttttttttatgatcattaacacgactccagggaagagccgaattcggcaatattattgtcattgtatgaaggatatcgggcatagtagccctgtattaaatattgactttttcaccgatgcgtcaagaaaagcggctgaaatttttacgatcgggtacatagcgagggaaagtatggaacgttgcggctgggtgagtcaggacccgctttatattgcctaccatgataatgagtggggcgtgcctgaaactgacagtaaaaaactgttcgaaatgatctgccttgaagggcagcaggctggattaagctggatcaccgtcctcaaaaaacgcgaaaactatcgcgcctgctttcatcagttcgatccggtgaaggtcgcagcaatgcaggaagaggatgtcgaaagactggtacaggacgccgggattatccgccatcgagggaaaattcaggcaattattggtaatgcgcgggcgtacctgcaaatggaacagaacggcgaaccgtttgtcgactttgtctggagctttgtaaatcatcagccacaggtgacacaagccacaacgttgagcgaaattcccacatctacgtccgcctccgacgccctatctaaggcactgaaaaaacgtggttttaagtttgtcggcaccacaatctgttactcctttatgcaggcatgtgggctggtgaatgatcatgtggttggctgctgttgctatccgggaaataaaccatgattcgggaagcgcaacgtagtgaactccccgcgatcctcgaactgtggctggaaagtacaacctgggggcatccctttataaaagcgaattactggcgtgactgcattccgctggtgcgggatgcctatcttgccaacgcgcaaaactgggtctgggaagaagacggtaagcttctcggttttgtcagcattatggaaggccgatttctggcagcgatgtttgtcgcaccgaaggccgtcaggcgcggtattggtaaggcgctgatgcagtatgtgcagcagcgccatccccacctgatgctggaggtttatcaaaaaaatcaaccggcgataaatttttaccaggcacagggttttcacattgtcgattgcgcatggcaggatgaaacccaactacccacatggattatgagctggccggtggttcaaacgctgtaattaactgctggccggtggttcaaacgctgtaagtgtcagttccggaccgttgtatttttccagccatgccagcgccgtattacccgcacagccattccccagccggctgctggggagatctttggtcagcacgttcactgcgccgtttttacaaataccgtcagcggttaaatccagatccggccatgccccttcgtgaatgcaaatcacgccaggtttaattccctcgctaatgaccgctccggcaagaatttgcccgcgtgcgttccacaaccgaacagtatcgccatcttgtatgccgcgctcctgggcatcgtcaggatgaatggtgacaggctcacgatttgccaccgcgtacaattcgcgcagagaactgtaattcagctggctgtgcaggcggtgcgccggatgggcagaaagtacctgcaactgttctggttcggcattgccctgccattcgtccggctccagccacattggatgcccagggcaatccgggtaaccgtaatcggcaatacgctgactgaagatttcaatcttgccgctggcggtttttaacggatgcgccagcggatcgcggcaaaaatcagcgaagcgaataaaccgctcgctgtccgggttttccggcatctcaattaactggttggcttgccagaactcagcaaatggcggcaattcaacctgctggcttgccccgcgctgtcgggcaacgttataaaacgtttccagccattgcagctcactttttccttccgtaaaacgtgcataaccgcccttctcccagcgttcacttaactcggcaaaaacatcaaaatcattacgcgcttcatagcgtggcggcaccacttgcttcatcggcaccagatgctgattactgtaatcaccggtcatggtgagatcattacgctcaaaagaggtagtcgcaggcagaacgatatccgcgtgttttgccgccgccgtccagaagcattcagagatcaccaccagctccggtttttgccaggcacggatcaggcgattggtatcctgatgatgagtaaagttggcaccgcccgcccaccagataaaacgaatatccgggaaatgtcggttcataccgttgtgttgatatgcgccaccagggttttccagtgcttcaacaatgcgggcaacagggattttatccaccgcatcgcagccacccggcaagctgccctgcatggaagagagcaccgcagaacgccgcgtggggttaccaccattggcaaaatggtaagaaagaccaaaaccgccgccgggtgtgccgatttgccccaacattgctgccagcgtgacgatcatccagtgtttttgctcaccaaactgttggcgctgcattccccagcctgccatcagcatggtggtattttggtggaaaatagccgccagctcgcggattttcgctgcgccaacaccacaaatctctgctgcccattcggcggttttcgctattccgtcactctcgcccagcaaataagaggcgaagacggcataacctgtggtgcaacgcgccagaaacgcttcgtcgtgccaaccattttccaccagcgtatgggcgatccccagcatcagcgcaacatcggtgcccatgtgcggtgccacccactccattttatcgccaaagaaatcgacggtttcgcttcgcattggatcaatgcagatcagctttttcccgctgtcacgcagtgcagaaaagtaagaaagcccctgctcatcggatgcattccacgcaattttcagcgtattgagtgggttagcactccacagcaccacgacatcgctatgttccagcaccagcggccaactggtctgctgttgataaacttcactaccacccacgacatacggcatgatcgcctgtgccgcgccggtgctataatcccccagatgcccggtataaccgcctgccagcgccatatagcgttgtaataatgtgctggccttatgcagcacgccgttactacgccagccgtaggaaccagcaaaaatgcttgccggaccataagcctcacgaatgcgtttatgttgttggtgaataagatccagcgcctcatcccaactcacgcgaacaaattcatcctgcccacgaatgccttgcgggttttccggactcgcaagaaagccttttcgcaccattggaaatcgtacccgcgtattgctgtgaacctggtcgcgaaccgcgctctgcaaggagttttccattcctgtggctaacgcgccacggctgctaaacacggtttcgccgtcggtttcaaccagcatgggcccccaatgggcggcagtcagaacggaatatcgtgaggatgagttggccaaaccgaagactcctgaaaggttagatgtattgagcagttaaatattacttacaaatttccgagtattcccaggaataatcttcatgttcacgcggcataatctcccgccacggaacccgtggcaaagaataaaaaggttattaaggattaacaatgaagaaacgtgtttatcttattgccgccgtagtgagtggcgctctggcggtatctggctgcacaactaacccttacaccggcgaacgcgaagcaggtaaatctgctatcggcgcaggtctgggctctctcgtgggcgcgggtattggtgcgctctcttctagcaagaaagatcgcggtaaaggcgcgctgattggcgcagcagcaggcgcagctctgggcggcggcgttggttattacatggatgtgcaggaagcgaagctgcgcgacaaaatgcgcggcactggtgttagcgtaacccgcagcggggataacattatcctcaatatgccgaacaatgtgaccttcgacagcagcagcgcgaccctgaaaccggcgggcgctaacaccctgaccggcgtggcaatggtactgaaagagtatccgaaaacggcggttaacgtgattggttataccgacagcacgggtggtcacgacctgaacatgcgtctctcccagcaacgtgcggattccgttgccagcgcgttgatcacccagggcgtggacgccagccgcatccgtactcagggccttggcccggctaacccaatcgccagcaacagcaccgcagaaggtaaggcgcaaaaccgccgtgtagaaattaccttaagcccgctgtaatccctttcatgccaggtgatgcagaaatcacctggcattcttcagttttccttcatcatatttcaggctaaggtgatcgccttatcagtgaatggagagaagcatgaagccgtccgttatcctctacaaagccttacctgatgatttactgcaacgcctgcaagagcatttcaccgttcaccaggtggcaaacctcagcccacaaaccgtcgaacaaaatgcagcaatttttgccgaagctgaaggtttactgggtagtaacgagaatgtaaatgccgcattgctggaaaaaatgccgaaactgcgtgccacaagtacgatctccgtcggctatgacaattttgatgtcgatgcgcttaccgcccgaaaaattctgctgatgcacacgccaaccgtattaacagaaaccgtcgccgatacgctgatggcgctggtgttgtctaccgctcgtcgggttgtggaggtagcagaacgggtaaaagcaggcgaatggaccgcgagcataggcccggactggtacggcactgacgttcaccataaaacactgggcattgtcgggatgggacggatcggcatggcgctggcacaacgtgcgcactttggcttcaacatgcccatcctctataacgcgcgccgccaccataaagaagcagaagaacgcttcaacgcccgctactgcgatttggatactctgttacaagagagtgatttcgtttgcctgatcctgccgttaactgatgagacgcatcatctgtttggcgcagaacaattcgccaaaatgaaatcctccgccattttcattaatgccggatgtggcccggtggttgacgaaaatgcactgatcgcagcattgcagaaaggcgaaattcacgctgccgggctggatgtcttcgaacaagagccactgtccgtagatagcccgttgctcagtatggccaacgtcgtcgcagtaccgcatattggatctgccacccatgagacgcgttatggcatggccgcctgtgccgtggataatttgattgatgcgttacaaggaaaggttgagaagaactgtgtgaatccgcacgtcgcggactaagccgcgactgcgtagagtaaagcccgataatcgctcgggcttttactctttattgggttgcagtaactgctgtagtccaggcctgattaaacgcctgatgctgtgccggtaatggcgcaatcagtttgttatattcacttgcctgctgactagtcgggaactggatgccatttgcgacaaagctcacctgagtaccttgctgagcaatgtagtctccaaccatcaccagttgttgcgtgaaagtttgtgccgccggaatcaacggttgcaatgcatcagctggcgtcgttaccactttggtgaatgcctgatcaaagaccggtttcaaatcatcgctctgttttagcgcagagtgcgcagcatcggcctgcaacttcgcattttgcagttgttgcgccagcacacccaggctaccgttcatttcacgcagcggaccgctttgcgtaacgtaatcctgcggtacgcgaattgcgttaacgctgtctacaaccgggcgcagaccggaatccatcgcctgattcacctgctgagaataaccatacagaatcgcgtaatcagagacaaaaggaccaaactgttttttctgatcggcagtcagggttggtagacgttcaccgctacgcatcactgtattctgcaggaagtcgataaacgctttacgctgatcgccttctttatcaaaacacccactcaggctaactaccattaataacgccgcaagaggcgcaaaccagcgagagcaggactttcctgtcgccattttcttactcctttcacccaaaaaaagcgcacaacgacacacgcgtgtctgacgtgacaaggatagtccaggacaggcttgcaggataccctttctacgtaatcttcctggtaaaatcatggagaaaatgaaacaaggttaatttgttgtttcattgttaaaaaatgatagtgccgttgccttttttgtagccagagatttacgccttcgcagaaggttagattttcgaaatctttacaaaacaggagtggtaagagatatatcggcatttatcagatcgttaggtggctataagtcacgctaaatgacaggctgaatcgaatcatagccagagcatgccctgacttcaccccgctgtgtctgcttttcccgactattcttaatgagcttcgatgcaattcacgatcccgcagtgtgatttgaggagttttcaatggaatataaagatccaatgcatgagctgttgagcagcctggaacagattgtttttaaagatgaaacgcagaaaattaccctgacgcacagaacaacgtcctgtaccgaaattgagcagttacgaaaagggacaggattaaaaatcgatgatttcgcccgggttttgggcgtaagtgtcgccatggtaaaggaatgggaatccagacgcgtgaagcctagtagtgccgaactaaaattgatgcgtttgattcaagccaacccggcattaagtaagcagttgatggaataaacttttatccactttattgctgtttacggtcctgatgacaggaccgttttccaaccgattaatcataaatatgaaaaataattgttgcatcacccgccaatgcgtggcttaatgcacatcaacggtttgacgtacagaccattaaagcagtgtagtaaggcaagtcccttcaagagttatcgttgatacccctcgtagtgcacattcctttaacgcttcaaaatctgtaaagcacgccatatcgccgaaaggcacacttaattattaaaggtaatacactatgtccggtaaaatgactggtatcgtaaaatggttcaacgctgacaaaggcttcggcttcatcactcctgacgatggctctaaagatgtgttcgtacacttctctgctatccagaacgatggttacaaatctctggacgaaggtcagaaagtgtccttcaccatcgaaagcggcgctaaaggcccggcagctggtaacgtaaccagcctgtaatctctgcttaaaagcacagaatctaagatccctgccatttggcggggatttttttatttgttttcaggaaataaataatcgatcgcgtaataaaatctattattatttttgtgaagaataaatttgggtgcaatgagaatgcgcaacgccgtaagtaaggcgggaataatttcccgccgaagactcttactctttcaatttgcaggctaaaaacgccgccagctcataactctcctgtttaatatgcaattcacacagtgaatctcttatcatccaggtgaaaaataaaagcgtgaaacaaatcactattaaagaaagtaatctatatttctgcgcattcccagcctcctgtgttgatttccaacgagtataactttgatttatagtcaggtggggcttttctctgtctgcctttcggtgaatacctgagacaaacagtctcaagcacccgtggctattctagcttaataagtttgtttcttctccttgatataatcctaaaaaaatctcataaaattaatatatgagataatctttattcagcagaagattattaaaggttgctgtattatttagcgataaaaaaagcctgccagatggcaggctatttaataacggcgttattattgcaacaggctaatatccgcaacgcgcaggaacagttcgcgcagtttctccagcatggtcagacggttgatacgcaattctttgtcatcaaccatgaccatcactttatcgaagaaagcatcaaccggttcacgcagctcagccagttcgaccagcgcatcctggtaacgaccttccgtaaagtacggctccagcttgtcacgtagcaccacaacctgcatcgccagtttaatttcttccggctctttcagggtagaggcattcacgcggtcgctcagcacttcgtcagatttcgccagaatgttagatacacgtttgttcgccgccgccagtgcagcagctgcatccagggtacggaaatggcttaccgctttcatacgggcatcgaaatcagccggacgagtcggacgacgcgccagtaccgcctggatggtgtcaacggtataaccttcgtcctgataccaggcgcggaagcgaccgagcataaagtcgataacatcatcaactacgttggcattagtcagcttatcgccatacagacgcaccgcttcttcggtcagcgtttgcagatcaaggttgaggttcttctcaacgataattcgcagcacgccaagcgcggcacgacgcagcgcaaacgggtctttgtcgcctttcggatgctgaccgataccgaagatacccgccagggtatccatcttgtcagcaatcgccagcgcacaagctactgggttggacggcaggtcatcaccagcaaaacgcggctgatactgctcattcagcgccaccgcgacatcttccgcttcgccatcgtgacgcgcatagtgcatccccataacgccctgggtgtcggtgaactcgaagaccatgttggtcatcaggtcgcacttagacagcagacccgcacgggtagcgtggttaacgtcagcgccaatctgttcagcaatccagccagccagcgcctggatgcggtcagttttgtcgcgcagcgtccccaactgttgctggaacaacacggtttgcaggcgcggcaggttatcttcaagacgttttttacggtcggtgttgaagaagaactcggcatccgccagacgcggacgaacgactttctcgttaccggagataatctgctgcggatctttgctttcgatgttggcaacgaagataaagttcggcagcagtttgccgtcgttcgcatacaccgggaagtatttctggtcacctttcatggtgtaaaccagcgcttcagccggcaccgcgaggaatttctcttcgaattttgcggtcagaacgaccggccactccaccaggctagccacttcttccagcaggctttcgcttaagtcagcgttaccgccaatcttacgcgctgcttcttcggcatcggctttaatcttcgccttacgttcttcgtaatcggcgatgactttcccacgctcacgcagaatttccggatactgatcggcgttatcgatggtgaattccggctcgcccataaagcggtggccgcgaatcacgcgatcggactgaatgcccagaatggttgccggaatgactttgtcgcccagcagcagggtcacggtgtgcaccggacgcacgaagtgcacgtcgcttgcgccccaacgcatcagtttcgggatcggcagtttcgccagagaagtcgcaaccatattcggcagcagtgcttcggtgctttcgcccttcacatgggcgcgatacagcagccattcgcctttatcggtagtcagacgctcagcctggtcaacggtaataccgcaaccacgcgcccaaccttctgccgctttgctcggtttgccttcagcgtcgaacgcctgggcaatcgccgggccgcgtttttcgatttcacgatccggttgcgcttccgccaggttagctactttcagcgccagacgacgcggagcagcaaaccattgaacggtgccgtgtgcgaggccagcgttatccagctccgcagtaaagttcgcagcaaaggactcagccaggctgcgcagtgcttttggtggcagctcttcagtgccgatttccaccagaaaagttttctcagacatagccgcctcttacttatctttgttgcacatcgggaagccgagggcttcacgggaagcgtagtatgcttctgccactgctttggtcagggtgcgaatgcgcagaatgtagcgctgacgctcggtgacggagatggctttacgcgcatccagcaggttgaagctgtgggcggctttcagaatacgctcgtaggctggcagcggcagcggattttccagcgccagcagctgctgcgcttctttctcgtactgctcgaagcaggtgaacaggaagtccacatccgcgtattcgaagttgtaagtggactgctccacttcgttctgatggaacacgtcgccgtaggtggttttacccagcgggccgtcgctccagaccaggtcgtaaacgctgtctacgccctgaatgtacatggccagacgttccagaccgtaggtgatctcgccggtaaccggtttacactccagaccaccaacctgctggaagtaagtgaactgcgtcacttccatgccgttcagccacacttcccagcccagtccccaggcacccagcgtcgggttttcccagttatcttccacgaaacggatgtcgtgaatagtcgggtccatgcccagctctttcagagaaccgaggtacagctcctgaatattgtccgggcttggcttaatgaccacctggaactgatagtagtgctgtaaacggttggggttttcgccgtagcgaccatcggtcgggcgacgagaaggctgaacataagcagccgccatcggttctggccccagctcgcgcagacaggtcattgggtgagaggttcccgcgccgacttccatgtccaatggttgaacaatggtgcagccctggcgagcccagtaatcctgtaaggtcaggatcaagccctggaaggtcctggtatcaaacttttgcatattatttcgtgctggatacgtgtggatttaaaggaagggatcagtatacccgctggatggaagatatacagtacgaaacgggaaaaagcagggcttaacgcatggaaagatgcaaaaaatggccatccgcgtcaaaagaacagacaaactgctctttacggaaggtataaccgcgcatttcatagcttccctggaactgttcgaaggcggtgacgtcgattttttgctcgccggtgttataacgttttgccgcctgatccttgcataacgcttccatattcaagctacgcagaggatcaacctttacccgttgtgctttctgcacgggactcggtatagaacaacccactagcaccataagcgccattgccggaaagaaagcgttcatcatcattaaattaccgtctggtttgcaggtgagtcttattatttatatcggtatagtggctgatatcttacgaatttccttaagcctctataagctgtagtgataaaactcagattattccagtgcgccaaccaaatgatttatcggtcagactttttttaaccagatacagagacacagatgcagcccaaaatttactggattgataacctgcgagggatagcgtgtttaatggtggtgatgattcacaccactacctggtatgtgaccaatgctcatagtgttagccccgtcacatgggatatcgccaatgttctgaattctgcctctcgtgtcagcgtgccgctatttttcatgatttccggctatctcttttttggcgaacgcagcgcccagccgcgccatttcttgcgtatcggcttatgtctgattttttatagcgcaatcgcactgctctacattgcgctgtttacctccatcaatatggagttagcgctgaaaaacctgctgcaaaagccagtgttttaccacttgtggtttttcttcgcgattgcggtgatttatctggttagtccgctgattcaggtgaagaacgtcggcggaaaaatgttgctggtgctaatggcggtgattggcattatcgctaacccaaacacagtgccgcagaaaattgacggttttgaatggctgccaattaacttatatatcaatggcgatactttttactacattctgtatggcatgttgggccgcgctatagggatgatggacacacagcataaagcactgagctgggtgagcgccgcgctgtttgcgacgggggtttttattatctctcgcgggacattatatgaattgcagtggcgcggaaattttgccgatacctggtatctttactgtgggccgatggtttttatctgcgcaatcgcgctattgactctggttaaaaacacgctggatacgcgtaccattcgcggacttggcttaatctcccgccatagtttgggtatatacggattccacgccttgattatccatgcgctgcgcacccggggaattgagcttaaaaattggccaatactggatattatttggatcttttgcgcgacgttggcagcgagtttgttactttctatgctggtacaacgaatcgacagaaacagattagtgagttaagtaaaagcccggtcacattggactgaccgggcttacgtgagttattcgctgtattcttcctgggtaacctgtgtttcttttggtgggtttattccggcatcacgaatatttttctgcaccgctactgcaccaaacaagcttaagaagaaagccagtccataaaaacctttttcgctgagtaataatgtcgcattccacagacctaccatcagtaatgcaacagagataataaagacagtcaggcaggtcatataataaatggaagtggtcggtatgccttcatacttgtcccgaacggtcttttgataagacgccgcagaaaacagtcctaataccagtacggcaaaataatatcctttttcatttaactgcatctctgcattccatagccctaacagataggtaacgataccaccaacgagagctatccaactcacaatactaaaggccggactataggtacttattttgttgtccatcacagtattcctttcattcctgaatatgtaagagctttatgttgctcatgcgctgcgaaacaaacgcatttgaccaaacaagcagacaaaaaaggcgatgggatagatcaccatttcataagtattgataggtgcgtttaaaacaccgataaacaagagaccgatagtgattaacgcaactaactggcagatatgggtaaaaaaatcatccagttgcccgagtttttctgcgcgaagatatgcatagttgccaaaagttgctgtcattaacacgccaagaaaatagccttttccacttaacaatgggcaactgatccatagcccaaccagataaaccagcgccccgacaacaaataatagtttcgccacagtcttactggttttcataacgatctccatatctaccagcgatacattacgagtaaccaacgaaagacaaaactgaaaaatgccattaacaaatgattttcagaataaattcatactaaatattaattaattactgagatatatagatgtgaattatcccccacccggtcaggcaggggataacgtttacgccattaatggcagaagttgctgatagaggcgacggaacgtttctcgtcgtggctgataagcggcataacgctgcgcatctggtagatggctctgttctaacggtagttgcggcaacaattcaatgaggcttttctctggattcgccgcgatctgcgccagccttgctgcgcccagtgctggccccacatccccccccgtacggtaatcgagctgctgaccgctgatatccgccagcatctgacgccagtactcactacgcgccccgcccccaatcaacgtaacactttgcggtttaataccgcaggcatgcacgacatccatgccatctgccagcgcataacccacgccttccagcactgctcgcgccagttcattggggccatgttgatgagtcaaaccaaagaaaacccccttcgcctggggattattgtgtggcgtacgctcgccggaaagataaggcagaaaccaaactggctcggcactttcatcagcctgttgagctgcagcgattaaagctgggacattgctcaggccggttaatttcgcggcccaatccagacagctcgctgcactcagcatcacagacattaaatgccaacgttgcggtagcgcatggcaaaagctatgtacggcgctttctggcttgcttaagaacccttcgctgacagcaaaatagaccccgctcgtccccaggcttaacattgcctgattagcatcaaccattcccacaccaactgcaccagctgcattgtcgccaccgcctgcgacaactggcaccgtcgccataccccacgctttcgcaacttcaggtaacaaagcaccagtaatttcgctgccttcgtataatgcgggcatctggtcacgagataagtcgcaagcctgcagcatgacgtcactccagtcacgctttgcgacatccagccacatggtgccagctgcgtcagacatatcgctggcaaactcccccgtcatacgcagacgcaagtaatctttcggtaataatactttgtcgatttgacggaatatctccggctcatgccgctgaacccatagcaatttaggcgcagtaaatccgggcatcatcaggttgccggtaatcacccggctttgcggaactcgcgcttccagcaaagtgcactcttgcgcacagcgcccgtcgttccacaaaatggcagggcgtaacacccgttgctgagcatccagcaaggttgctccgtgcatctggccggcaatacccaatgctttaacgtcctgcagagaatgctgatcgcccagagctttcattgcgcgatcagttgcctgccaccactgttccgggtcttgttcgctccagagtggatgcgggcggctaacggtcagcttttccgtttgcgcagcaaccacctcaccctgctcgttgagcaaaataacttttacgccgctggtgccaagatctatcccgatatacatatcgatcgttccttaaaaaaatgcccggtatcgctaccgataaccgggccaacggactgcacagttagccgttatttgtcgaacagataatggtttaccagattttccagttgttcctggcgaccactctgatgcaccggagacaaatgatgttcctgagcatatttggctaaatctgccagactcatttggcctttcaggatttgctggcccaattcgctattccagccggaataacgctgcgcgatgcgtttatccagctcgccatcttcaatcatgcgcgctgcaattttcagcgccagtgccatcgtatccatcgcgccgatatgaccgtaaaacagatcatatttatcagtactttgacgacgtactttggcatcgaagttcagaccaccggtggtgaaaccgcctgctttgagaatttcatacatcaccagcgcattctcttccacactgttcgggaactggtcggtgtcccagcccagttgcgcatcgccacggttggcgtcgacagaaccgaacaggccaagcgcaatggcggtggctatttcatgatggaaagagtgacctgccagcgtcgcgtggttagcttcaatgttcagtttaatctctttttccagaccaaactgtttcaggaagccatagaccgtcgcggcatcgtaatcatattgatgtttggtcggttcttgcggtttcggttcgataagcaacgtgccctggaaaccgattttatgtttatgctcaaccaccatctgcataaagcggcccagttgttcacgctcctgacgcaagtcggtatttaacagcgtttcgtaaccttcacgaccgccccacaggacatagttttcaccgcccaatttatgggttgcttccatcgctgtaacaacttgcgttgccgcccagctgaagacttcaggatctgggttcgtcgccgcacccgcgccgtagcgagggtttgtaaagcagttggccgttccccacagcagcttcacgccgctctcttcttgcttgcctgccaggacatcaaccatttgcgcaaaattattgatgtactcttttaagctcgcgccctcaggggaaacatccacatcgtggaagcaataaaatggcacatgtaacttgtggaaaaactcaaatgcgacatctgctttacgcttcgccaacgccagtgcctcaccaggctgctgccacggacgattaaacgcccccacaccaaacatatccgccccgttccagcagaaggtgtgccagtagcaggcggcaaaacgcaagtgctcttccatacgcttacccaacaccagttcgtcgggattgtagtgacggaatgctaacgggttactggatttactgccttcataacgaacgcgatcgagctggtcaaaataggcttgcatattgaactccataatcaggtaatgccgcgggtgatggatgatgtcgtaatattgggcactccctttcagttgctcaattatgttatttcacactgctattgagataattcacaagtgtgcgctcgctcgcaaaataaaatggaatgatgaaactgggtaattcctcgaagagaaaaatgcaataagtacaattgcgcaacaaaagtaagatctcggtcataaatcaagaaataaaccaaaaatcgtaatcgaaagataaaaatctgtaattgttttcccctgtttagttgctaaaaattggttacgtttatcgcggtgattgttacttattaaaactgtcctctaactacagaaggccctacaccatgaaaataaagaacattctactcaccctttgcaccagtctcctgcttaccaacgttgctgcacacgccaaagaagtcaaaataggtatggcgattgatgatctccgtcttgaacgctggcaaaaagatcgagatatctttgtgaaaaaggcagaatctctcggcgcgaaagtatttgtacagtctgcaaatggcaatgaagaaacacaaatgagccagattgaaaacatgataaaccggggtgtcgatgttcttgtcattattccgtataacggtcaggtattaagtaacgttgtaaaagaagccaaacaagaaggcattaaagtattagcttacgaccgtatgattaacgatgcggatatcgatttttatatttctttcgataacgaaaaagtcggtgaactgcaggcaaaagccctggtcgatattgttccgcaaggtaattacttcctgatgggcggcagcccggtagataacaacgccaagctgttccgcgccggacaaatgaaagtgttaaaaccttacgttgattccggaaaaattaaagtcgttggtgaccaatgggttgatggctggttaccggaaaacgcattgaaaattatggaaaacgcgctaaccgccaataataacaaaattgatgctgtagttgccagtaacgatgccaccgcaggtggggcaattcaggcattaagcgcgcaaggtttaagtgggaaagtagcaatctccggccaggatgcggatctcgcaggtattaaacgtattgctgccggtacgcaaactatgacggtgtataaacctattacgttgttggcaaatactgccgcagaaattgccgttgagttgggcaatggtcaggaaccaaaagcagataccacactgaataatggcctgaaagatgtcccctcccgcctcctgacaccgatcgatgtgaataaaaacaacatcaaagatacggtaattaaagacggattccacaaagagagcgagctgtaagcgttacgccccagcgcggagcgggggcgtgatttctctccatgccgcgtgaatgaattggcttaggtggagtcgttatgccttatctacttgaaatgaagaacattaccaaaaccttcggcagtgtgaaggcgattgataacgtctgcttgcggttgaatgctggcgaaatcgtcagtctttgtggggaaaatgggtctggtaaaagtacgctgatgaaagtgctgtgtggtatttatccccatggctcctacgaaggcgaaattatttttgcgggagaagagattcaggcgagtcacatccgcgataccgaacgcaaaggtatcgccatcattcatcaggaattggccctggtgaaagaattgaccgtgctggaaaatatcttcctgggtaacgaaataacccacaatggcattatggattatgacctgatgacgctacgctgtcagaagctgctcgcacaggtcagtttatccattagtcctgatacccgcgttggcgatttagggcttgggcaacaacaactggttgaaattgccaaggcacttaataaacaggtgcgcttgttaattctcgatgaaccgacagccagtttaactgagcaggaaacgagcattttactggatattattcgcgatctacaacagcacggtatcgcctgtatttatattagccacaaactcaacgaagtcaaagcgatttccgatacgatttgcgttattcgcgacggacagcacattggtacgcgtgatgctgccggaatgagtgaagacgatattatcaccatgatggtcgggcgagagttaaccgcgctttaccctaatgaaccacataccaccggagatgaaatattacgtattgaacatctgacggcatggcatccggttaatcgtcatattaaacgagttaatgatgtcagcttttccctgaaacgtggcgaaatattgggtattgccggactcgttggtgccggacgtaccgagaccattcagtgcctgtttggtgtgtggcccggacaatgggaaggaaaaatttatattgatggcaaacaggtagatattcgtaactgtcagcaagccatcgcccaggggattgcgatggtccccgaagacagaaagcgcgacggcatcgttccggtaatggcggttggtaaaaatattaccctcgccgcactcaataaatttaccggtggcattagccagcttgatgacgcggcagagcaaaaatgtattctggaaagtatccagcaactcaaagttaaaacgagctcccccgaccttgctattggacgtttgagcggcggcaatcagcaaaaagcgatcctcgctcgctgtctgttacttaacccgcgcattctcattcttgatgaacccaccaggggtatcgatattggcgcgaaatacgagatctacaaattaattaaccaactcgtccagcagggtattgccgttattgtcatctcttccgaattacctgaagtgctcggccttagcgatcgtgtactggtgatgcatgaagggaaactaaaagccaacctgataaatcataacctgactcaggagcaggtgatggaagccgcattgaggagcgaacatcatgtcgaaaagcaatccgtctgaataacgcattgaggagcgaacatcatgagcaaaagcaatccgtctgaagtgaaattggccgtaccgacatccggtggcttctccgggctgaaaagtctgaatttgcaggtcttcgtgatgattgcagctatcatcgcaatcatgctgttctttacctggaccaccgatggtgcctacttaagcgcccgtaacgtctccaacctgttacgccagaccgcgattaccggcatcctcgcggtaggaatggtgttcgtcataatttctgctgaaatcgacctttccgtcggcagtatgatggggctgttaggtggcgtcgcggcgatttgtgacgtctggttaggctggcctttgccacttaccatcattgtgacgctggttctgggactgcttctcggtgcctggaacggatggtgggtcgcgtaccgtaaagtccctagttttattgtcaccctcgcgggcatgttggcatttcgcggcatactcattggcatcaccaacggcacgactgtatcccccaccagcgccgcgatgagtcaaattgggcaaagctatctccccgccagtaccggcttcatcattggcgcgcttggcttaatggcttttgttggttggcaatggcgcggaagaatgcgccgtcaggctttgggtttacagtctccggcctctaccgcagtagtcggtcgccaggctttaaccgctatcatcgtattaggcgcaatctggctgttgaatgattaccgtggcgttcccactcctgttctgctgctgacgttgctgttactcggcggaatgtttatggcaacgcggacggcatttggacgacgcatttatgccatcggcggcaatctggaagcagcacgtctctccgggattaacgttgaacgcaccaaacttgccgtgttcgcgattaacggattaatggtagccatcgccggattaatccttagttctcgacttggcgctggtagtccttctgcgggaaatatcgccgaactggacgcaattgcagcatgcgtgattggcggcaccagcctggctggcggtgtgggaagcgttgccggagcagtaatgggggcatttatcatggctagtctggataacggcatgagtatgatggatgtaccgaccttctggcagtatatcgttaaaggtgcgattctgttgctggcagtatggatggactccgcaaccaaacgccgttcttgattttgataaaaattttctcaaagccggttacgtattaccggttttgagtttttgcatgattcagcaggaaaagaaccatgtttactaaacgtcaccgcatcacattactgttcaatgccaataaagcctatgaccggcaggtagtagaaggcgtaggggaatatttacaggcgagtcaaagcgaatgggatattttcattgaagaagatttccgcgcccgcattgataaaatcaaggactggttaggagatggcgtcattgccgacttcgacgacaaacagatcgagcaagcgctggctgatgtcgacgtccccattgttggggttggcggcagctatcaccttgcagaaagttacccacccgttcattacattgccaccgataactatgcgctggttgaaagcgcatttttgcatttaaaagagaaaggcgttaaccgctttgctttttatggtcttccggaaagtagcggcaaacgttgggccactgagcgcgaatatgcatttcgtcagcttgtcgccgaagaaaagtatcgcggagtggtttatcaggggttagaaaccgcgccagagaactggcaacacgcgcaaaatcggctggcagactggctacaaacgctaccaccgcaaaccgggattattgccgttactgacgcccgagcgcggcatattctgcaagtatgtgaacatctacatattcccgtaccggaaaaattatgcgtgattggcatcgataacgaagaactgacccgctatctgagccgtgtcgccctttctagcgtcgctcagggcgcgcggcaaatgggctatcaggcggcaaaactgttgcatcgattattagataaagaagaaatgccgctacagcgaattttggtcccaccagttcgcgtcattgaacggcgcagtacagattatcgcagcctgaccgatcccgccgttattcaggccatgcattacattcgtaatcacgcctgtaaagggattaaagtggatcaggtactggatgcggtcgggatcagccgctccaatcttgagaagcgttttaaagaagaggtgggtgaaaccatccatgccatgattcatgccgagaagctggagaaagcgcgcagtctgctgattagtaccaccttgagcatcaatgagataagccaaatgtgcggttatccaagcctgcaatatttctactctgtttttaaaaaagcatatgacacgacgccaaaagagtatcgcgatgtaaatagcgaggtcatgttgtaacgatgatgagaattgtcggcgtcacatcaggtaacgctgcgtggttgtcggatgcggcgtgaacgccttatccgacctacccgccaggcatgataaaacgcaccaacaacgcttcaggctcgtagctcaactgcctgagacaaagtaaaaagccttatccgactgacaagtcggataaggctcaaggaaatgcaattacatatgcgccgcgattaaccgttggttatcctggtacattgcgaacaggtagttgttataactcttccctttggtgctgtagcccttcagcttgtgaatcatcgctgtggcagtcacttcctgatccgctttacgcagctgcgcacggcttttacggaagctagagtaagccgggtgcgtattcaggttagtgacataggcgctcacgctttctttgacagaactaaactgactgtaccctttcactttacctggcgcattggtacaacgtcctttcatgcatttcatgccgaacaggttgttgttgttgcgcgccagcttgctcgttccccaaccgctttctgctgcagccatcgtcgccaccatactggtggggataatgtctacgcgttcaagcaaggtattccacgggatttttcgcgtattaccggaccacttcaccttgtagcgtttggcgatgtctttcagacgcgcacgctcagcaggactccattggccctgatactgtttactaatgagccagttacgttccgcagtaatggccgcattttggctggtaatgtaaggcattacggtccggagaaacgcctttttccttggtgttccggaagggtattttcgcaaatcaggaagactactactctttgcactattgcgagaatactcttgtttactgcttacctgtttattactagctttagttaagtgggacttttgactcgctgttgttgtgtgcgtcttcgctaacacctcactgctaaacaccagagtgagtaacataagaatcatcgccccatatcgtcgtatgggagtcaaaatcatcaggtctcctggtcggatttaatcattccaacaccttatatttttcacaaatttgagagttgaatctcaaatcatatcaaaaatagctgtcaagagcaccccaaggaatagtccaaatctgaaactatgtcacgtgttaacgattcagattggcgctaaatcgcagaaaatgtgggggttatcgcaaaattcagccgttttttgcgcgagatcgctcacccttgcttctcatcctgtggacttaccgctcagggatgagttttgtttggcttatcgctggcaaactgtctgaaatcgcagcaataaggactcatccgccatgaaactcgccgcctgttttctgacactccttcctggcttcgccgttgccgccagctggacttctccggggtttcccgcctttagcgaacaggggacaggaacatttgtcagccacgcgcagttgcccaaaggtacgcgtccactaacgctaaattttgaccaacagtgctggcagcctgcggatgcgataaaactcaatcagatgctttccctgcaaccttgtagcaacacgccgcctcaatggcgattgttcagggacggcgaatatacgctgcaaatagacacccgctccggtacgccaacattgatgatttccatccagaacgccgccgaaccggtagcaagcctggtccgtgaatgcccgaaatgggatggattaccgctcacagtggatgtcagcgccactttcccggaaggagccgccgtacgggattattacagccagcaaattgcgatagtgaagaacggtcaaataatgttacaacccgctgccaccagcaacggtttactcctgctggaacgggcagaaactgacacatccgcccctttcgactggcataacgccacggtttactttgtgctgacagatcgtttcgaaaacggcgatcccagtaatgaccagagttacggacgtcataaagacggtatggcggaaattggcacttttcacggcggcgatttacgcggcctgaccaacaaactggattacctccagcagttgggcgttaatgctttatggataagcgccccatttgagcaaattcacggctgggtcggcggcggtacaaaaggcgatttcccgcattatgcctaccacggttattacacacaggactggacgaatcttgatgccaatatgggcaacgaagccgatctacggacgctggttgatagcgcacatcagcgcggtattcgtattctctttgatgtcgtgatgaaccacaccggctatgccacgctggcggatatgcaggagtatcagtttggcgcgttatatctttctggtgacgaagtgaaaaaaagcctgggtgaacgctggagcgactggaaacctgccgccgggcaaacctggcatagctttaacgattacattaatttcagcgacaaaacaggctgggataaatggtggggaaaaaactggatcagaacggatatcggcgattacgacaatcctggattcgacgatctcactatgagcctagcctttttgccggatatcaaaaccgaaagtactaccgcttctggtctgccggtgttctataaaaacaaaatggatacccacgccaaagccattgacggctatacgccgcgcgattacttaacccactggttaagtcagtgggtccgcgactatgggattgatggttttcgggtcgataccgccaaacatgttgagttgcccgcctggcagcaactgaaaaccgaagccagcgccgcgcttcgcgaatggaaaaaagctaaccccgacaaagcattagatgacaaacctttctggatgaccggtgaagcctggggccacggcgtgatgcaaagtgactactatcgccacggcttcgatgcgatgatcaatttcgattatcaggagcaggcggcgaaagcagtcgactgtctggcgcagatggatacgacctggcagcaaatggcggagaaattgcagggtttcaacgtgttgagctacctcagcagccatgatacccgcctgttccgtgaagggggcgacaaagcagcagagttattactattagcgccaggcgcggtacaaatcttttatggtgatgaatccagccgtccgttcggtcctacaggttctgatccgctgcaaggtacacgtagcgatatgaactggcaggatgttagcggtaaatctgccgccagcgtcgcgcactggcagaaaatcagccagttccgcgcccgccatcccgcaattggcgcgggcaaacaaacgacacttttgctgaagcagggctacggctttgttcgtgagcatggcgacgataaagtgctggtcgtctgggcagggcaacagtaacttttccggcttcccgttcgtcagtacctcgggaagccgccaaccaggataaaatgtcagccctaatcagcgttgcaggataaagcaccgctcactcttcaacagaccgatttgcaccccagcaaatgtagcgttattgttaccttccttgctacagagttcgacagatatcccgctatgacattctccctttttggtgacaaatttacccgccactccggcattacgctgttgatggaagatctgaacgacggtttacgcacgcctggcgcgattatgctcggcggcggtaatccggcgcagatcccggaaatgcaggactacttccagacgctactgaccgacatgctggaaagtggcaaagcgactgatgcactgtgtaactacgacggtccacaggggaaaacggagctactcacactgcttgccggaatgctgcgcgagaagttgggttgggatatcgaaccacagaatattgcactaacaaacggcagccagagcgcgtttttctacttatttaacctgtttgccggacgccgtgccgatggtcgggtcaaaaaagtgctgttcccgcttgcaccggaatacattggctatgctgacgccggactggaagaagatctgtttgtctctgcgcgtccgaatattgaactgctgccggaaggccagtttaaataccacgtcgattttgagcatctgcatattggcgaagaaaccgggatgatttgcgtctcccggccgacgaatccaacaggcaatgtgattactgacgaagagttgctgaagcttgacgcgctggcgaatcaacacggcattccgctggtgattgataacgcttatggcgtcccgttcccgggtatcatcttcagtgaagcgcgcccgctatggaatccgaatatcgtgctgtgcatgagtctttccaagctgggtctacctggctcccgctgcggcattatcatcgccaatgaaaaaatcatcaccgccatcaccaatatgaacggcattatcagcctggcacctggcggtattggtccggcgatgatgtgtgaaatgattaagcgtaacgatctgctgcgcctgtctgaaacagtcatcaaaccgttttactaccagcgtgttcaggaaactatcgccatcattcgccgctatttaccggaaaatcgctgcctgattcataaaccggaaggagccattttcctctggctatggtttaaggatttgcccattacgaccaagcagctctatcagcgcctgaaagcacgcggcgtgctgatggtgccggggcacaacttcttcccagggctggataaaccgtggccgcatacgcatcaatgtatgcgcatgaactacgtaccagagccggagaaaattgaggcgggggtgaagattctggcggaagagatagaaagagcctgggctgaaagtcactaaaaattgcctgatgcgctacgcttatcaggcctacatgatttctgcaatatattgaatttggaagaatttgtaggccggataaggcgtttacgccgcatctggcataaacaaagcgcactgttccggcgttgagaaacgccggaaaacgtttcaaacaggctgctgccgtagccgatgccgctgcactttctcgacatccatgcactgcaacgcctttgtcgggcaggcttcaacacaggccggtcccgtctcccgatgccagcacagatcgcacttaatcgccctcgcctttttgcggctagaaacgacctccatcgcaccaaacgggcaagccagcatacagcttttacagccaatgcaacgtgtttgttcaacgaaaatatgcccatgttcgcggcttatcgcgtcaacagggcagacattcgcgcacggtgcatcttcacactgatgacaggctactgccgtggtccagcagtggtctttaatgacacgaatacgggaaataaactcgtctggactcaacgcagcgcaatcctgattctcatgatggctcactgcgcaagccacttcacaggtacggcaaccgatacatttcgtcgcatccgcaataataaaccggttcatgatcactcctttgcactaaaacagcagagtgccagagagcgcgtccctactgctttgatccaacgaaggaaatgttaaagttttggcacttgtccaaagcgttatgtgatcgcgcccaggtcatccctgacagtaaatcccagttcattagaaatagcctgcgcggtttcacgcagtggtttcaggagatttttctctcccacctgtttcagacgacttgtgctaaggctaatgctcacggcgtacggcacccgcccatgaatatcaaacaccggaacagcaatacaggagacgccgagttcgttttcttctctgtccatcgccgctccgctttcacgaatgtgcgccagttcgtcgaacatcgcgggcagctcggtaatggtattgcgggttaacggctggatctcatgctgatggctttcccagtaactcttcacgtagtccgggtgaccaaacgccatgtagatcttgcccattgcggaacagtagagcggcatatgctggccaatataggcacgggttcgcagcatcccggttgtgggttccagcttataaatcaaaatagcgtgatcgtcttcgcggctggagaagttaatggtttcaccagtggcgatgttcagtgcctcaagatgcggagcggcgatatgaatgatattcaggctagacagcgccttctgcccgacggcaataaatttggtggtcaggcgataactccctgcggcaggcgcggtggtcacatagccgcaggactgtaatccctgcaataagcgatggacggtactcttatttaaaccagccagctcgctaagatgcgccaacggacaaccgtttggatagttgctcaaaatctcaatcagcatcaacccgcgaaacagactctggcttccggctggacgctctttttcctgcgccatctcgttctctttttttcccatcacttctttccccattttgtcgcgtcctgatggtagcgcaaagtgtgccgtagttcacgatctcgacagataatttataaccaattgatttttatgtcttttgaaattcatcaatcagattgccttgttaaaaagtgatcgatatatttgaaatcaagtttcgcatattgaaattttaagccaaaaaagcgatcaaaaaaacaaggaagcctgggatgaaagtgacatttgagcagttaaaagcagcctttaatcgggtcttaattagtcgcggcgttgacagcgaaacggctgacgcctgtgcagagatgttcgcccgcaccaccgaatccggcgtttattctcacggcgttaatcgtttccctcgtttcattcaacaactggaaaacggcgatatcattcctgatgcccaacccaaacgtataaccagcctcggcgcaattgaacagtgggacgcccagcgtagcatcggtaacctgacagcgaaaaagatgatggatcgcgccattgaactggctgccgatcacggtattggtctggtggcactacgtaatgccaaccactggatgcgcggcggcagctacggctggcaggcggcggaaaaaggctatattggcatttgctggaccaactccatcgccgtaatgccgccgtggggcgcaaaagagtgtcgcataggcactaacccgctgatcgtcgccattccttccacgccgatcaccatggtcgatatgagcatgagcatgttctcttacggcatgttagaagttaaccgtctggcaggtcgtcagctcccggtcgatggtggctttgatgatgagggcaatttgaccaaagaacctggcgttatcgagaagaatcgccgcattttgccgatgggctactggaaaggttctggcatgagcattgtgctggatatgatcgctactctcctttccgacggcgcatccgttgccgaagtcacccaggacaacagcgacgaatacggcattagtcaaatttttattgccattgaagtggacaagcttatcgacggtcccacccgcgatgccaagctgcaacgcatcatggattacgttactagtgccgagcgtgctgacgaaaatcaggccattcgcttacccggccatgaatttactaccctgctggccgaaaaccgccgtaacggcatcactgttgatgacagcgtgtgggccaaaatccaggcgttatgaggagataagtcatgatttttggacatatcgcgcagcccaatccgtgccgtttgcccgccgccattgaaaaggcgctcgattttctgcgcgctaccgatttcaacgccctggagccgggcgttgtcgaaatcgacggcaaaaatatttatacgcaaattatcgatttaaccacacgcgaagcggtggtaaaccgtccggaagtgcatcgtcggtatatcgatattcagtttctggcgtggggcgaagagaaaatcggcattgctattgatacgggaaataataaagtcagcgaaagtctattagagcagcgcaatattattttttatcacgacagtgaacatgaaagttttatagaaatgataccgggcagctacgcaattttctttccgcaggatgttcaccgaccaggttgtattatgcaaacagcctctgagatacgaaaaattgtggttaaagtcgcattaacggcgctgaattaatcgaataatcgtctacgccagaacgcctgggtaatgttattgctctaactatattaataattcaggttgctgcacatgcgacttgaattatgacagacatagcctcaaggaatagctatgaaaaaaatactcgaagcaatactggcgattaatctcgccgtactttcctgtattgtatttataaacattattttaagatatggttttcagacaagcattttatctgttgatgaattgagtcgttatttatttgtctggttaacgtttattggcgcgattgtagcttttatggataacgcccacgttcaggtcacctttctggtggagaaactctcccccgcatggcagcgacgagtcgctctggttacccattccttaatcttatttatttgtggcgcactggcctggggcgcaacgctaaaaacaattcaggactggagcgattatagtccgatcctcggtttacccatcggcctgatgtatgccgcttgtctgcccaccagcctcgttatcgcattctttgaactgcgtcatttatatcaactcatcacgcgtagcaattctctaacgagcccaccgcaaggagcttaatcatggctgtgctgatttttctgggctgtctgttgggtggtattgctatcggtttgcctattgcctgggcactgttgttgtgcggggcggcgttaatgttctggctggacatgtttgatgtccagatcatggcacaaacgctggtgaacggagccgatagcttctccctgctggcgattccgttctttgtgctggcgggtgaaatcatgaatgcgggcggcttgagtaaacgcattgttgacctgccgatgaaactggtggggcataaaccaggcgggctgggctacgtcggcgtgctggcagctatgattatggcgagcctttctggttctgccgttgcggataccgccgccgttgccgctctactggtgccgatgatgcgcagcgccaactatccggtcaaccgggcggcggggctgattgcctctggcggcattatcgcgccaattattcccccttccattccgtttattatcttcggcgtttccagcggattatccatcagtaagctgtttatggcgggcattgcccctggcatgatgatgggcgcaacgctgatgcttacctggtggtggcaggccagtcgccttaatttaccccgccagcaaaaagcaacgatgcaggaaatctggcactcttttgtctccggtatctgggcgctgtttcttccagtcatcattattggcgggtttcgctccggcctgtttacccctaccgaagccggggccgttgctgctttctatgcgctgtttgtcgccacagttatttaccgtgaaatgaccttcgccacactttggcatgtactcattggcgcggcgaaaaccaccagtgtggttatgtttctggtggccagcgcacaagtttccgcctggctgattaccattgctgaactgccgatgatggtttctgatttactgcaaccgttggtcgatagtccgcgtctgctgtttatcgtcattatggtggctatcctgattgtcggcatggtcatggatttaacgccgacggtattaattcttaccccggtattaatgcctttagttaaagaggcaggaatcgatccgatttatttcggtgtcatgtttatcattaactgcagtatcggcttaattacaccgcctatcggtaatgtacttaacgttattagtggggtggcaaaactcaaattcgatgatgcagtcagaggcgttttcccttacgtcctggttttatatagtttattagtcgtatttgtttttattcccgatctcatcatcctccctttgaaatggattaattaaaaggaaaatattatgaaattacgctctgtaacctacgcattattcattgctggcctggctgcattcagcacatcttctctggcggcacaatctttacgtttcggttatgaaacaagtcaaaccgacagccaacatattgcggcgaaaaaattcaatgatttattgcaggagagaaccaaaggcgagctgaaattaaaactgttcccggacagcactctcggtaacgcgcaggcgatgatcagcggcgtacgtggcggcaccatcgatatggaaatgtccggcagcaataactttgccgggttaagtccagtgatgaacttgcttgatgtccctttcctgttccgcgataccgctcacgcgcataaaacgctcgacggcaaagtcggtgatgatctgaaagccagtcttgaaggtaaaggactgaaagtactggcctactgggaaaacggctggcgcgatgtcaccaacagccgcgcaccggttaaaacccccgccgacctgaaagggctgaaaatccgcaccaacaatagcccgatgaatatcgccgcattcaaagtctttggcgctaacccgatcccgatgccgtttgccgaagtctataccgggctggaaacccgcactatcgacgctcaggaacacccgatcaacgtcgtctggagtgcaaaatttttcgaagtgcagaagttcctttctctgacgcaccacgcctattccccgcttctggtggtgatcaacaaagcgaagtttgatggcttaagtccggagttccagcaggcgctagttagttctgcacaagaagcgggtaactatcagcgcaaactggttgctgaagatcagcaaaaaatcatcgacggcatgaaagaagcgggcgtggaagtcatcaccgatctcgaccgcaaagcctttagcgacgcactggggaatcaggttcgcgacatgtttgttaaagatgtgccgcagggagctgatctgctgaaagccgtggatgaggtgcaataaaccatgacgcaatactggctggggttagattgtggcggtagctggctgaaagccgggctgtatgaccgcgaaggccgggaggcaggcgtgcagcgcctgccgctgtgcgcattaagcccgcagccaggctgggcagagcgcgatatggcagaactgtggcaatgctgcatggctgtcattcgcgccctgcttactcattctggtgttagcggggaacaaattgtcggtatcggcatctccgcacagggaaagggcttgtttttgctggataaaaacgacaaaccgctcgggaatgctattttgtccagcgaccgccgggcgatggaaatcgttcgtcgctggcaggaagatggcatcccggaaaaactctacccgctgacccgacaaaccttgtggaccgggcatccggtgagcctgttacgctggctgaaagagcacgaaccagaacgctacgcgcaaattggctgcgtgatgatgacgcacgactacctgcgctggtgtttaactggcgtcaaaggctgtgaagagagcaatatttccgagtccaacctctacaacatgagtcttggggaatatgacccgtgcctcaccgactggctggggatcgctgaaatcaatcacgccctgccgcctgttgtcggatctgccgaaatctgcggggagatcaccgctcagacagccgccctgaccggtctgaaagcgggtacgcccgttgttggcggcctgtttgatgtggtttccaccgcactctgcgccgggatcgaagacgaatttaccctcaatgcggtgatggggacctgggcggtgaccagcggcataacccgcggtttacgtgacggtgaagcgcatccgtatgtctatggtcgctacgttaacgatggtgaatttatcgttcacgaagccagccctacctcttccggcaacctcgaatggtttaccgcacagtggggagaaatcagctttgatgagatcaatcaggccgttgccagcttgccgaaggctgggggcgatctctttttcctgccgttcctgtacggcagcaacgccggactcgagatgaccagtggtttctacgggatgcaggccattcacacccgcgcgcacctgttgcaggccatctatgaaggggtggtgttcagccatatgacccacctcaaccgaatgcgcgaacgttttactgatgttcacaccctacgcgtcactggcggcccggcgcactccgatgtctggatgcaaatgctggcggacgtcagcggtctgcgtatcgagctgccgcaggtggaagaaaccggctgctttggtgcggcccttgccgcccgcgtcggcaccggggtttatcacaacttcagcgaagcccaacgtgacttgcgacacccggtgcgcaccctgctgccagatatgaccgcccatcagctttaccaaaaaaaatatcaacgttatcagcatctcattgccgcacttcagggctttcacgcccgcattaaggagcacacattatgagccgaccacttctgcaactggccctcgaccacagtagtcttgaagccgcgcagcgcgacgtgacgctgttaaaagacagcgtcgatatcgtcgaagcgggcaccattctctgtttaaacgaagggcttggcgcggtgaaagccttgcgcgaacagtgcccggacaaaatcatcgttgctgactggaaggtcgccgacgctggtgaaacgctcgcgcaacaggcgtttggcgcaggcgctaactggatgaccatcatctgcgccgcgccgctcgcgacggtagaaaaaggccacgcaatggcacaacgctgcgggggtgaaattcagatagagctgttcggtaactggacgctggacgacgcccgcgactggcatcgtattggcgtgcggcaggccatttatcatcgcggtcgtgatgcacaggccagcgggcaacagtggggcgaagccgatctggcacgcatgaaggcgcttagtgatatcggccttgagctttccattactggcgggattacccctgctgacctgccgctgtttaaagatatccgcgtgaaagcgtttattgccgggcgggcactggcaggcgcggcaaatccggcgcaagtggctggcgatttccatgcgcaaatcgacgctatctggggaggtgcgcgtgcgtaatcatcagttagggatttatgaaaaagcgctggcgaaagatctctcctggccggagcggctggtgctggcaaaaagctgcggttttgattttgtcgaaatgagcgtggatgaaaccgacgaacggctcagtcgtcttgactggagcgccgcacaaaggactagcctggttgccgcgatgatcgaaacaggtgttgggatcccgagcatgtgcctgtccgcacatcgtcgctttccctttggtagccgtgacgaggcagtgcgcgaacgggcgcgggaaatcatgagtaaagcgattcgcctggcgcgcgatctcggcattcgcaccatccagctggcaggttatgacgtctattacgaagaccacgacgaaggcacccggcaacgttttgctgaagggctggcgtgggcagtcgaacaggcggcggcaagtcaagtaatgctggcggtggagattatggataccgcgtttatgaactccatcagcaaatggaaaaaatgggacgagatgctcgccagtccgtggttcaccgtctacccggacgtcggcaacctcagcgcctggggcaatgatgttcccgccgaactgaaactgggcattgaccgtatcgccgcgatccacctgaaagacacccagccagtcaccgggcaaagtcccggacagttccgcgacgtgccgtttggcgaaggctgcgtcgatttcgttggcatcttcaaaacgctgcataaactgaactatcgcggttctttcctgattgagatgtggaccgaaaaagccaaagagccggtgctggagattattcaggcgcggcgttggattgaagcgcgtatgcaggaggctggatttatatgttaacgtaaatgcaggaggctggatttatatgttagagcaactgaaagccgacgtgctggcggcgaatctggcgcttcccgctcaccatctggtgacgttcacctggggcaatgtcagcgcggtagacgaaacgcggcaatggatggtaatcaaaccttccggcgtcgagtacgacgtgatgaccgccgacgatatggtggtggttgagatagccagcggtaaggtggtggaaggcagcaaaaaaccctcttccgatacaccaacgcatctggcgctctaccgtcgctatgccgaaattggcggtattgtgcatacccacagccgccacgccaccatctggagtcaggccgggctggatctccccgcctggggcaccacccacgccgattatttttacggtgccatcccctgcacgcgacagatgaccgcagaggagattaacggcgaatatgaatatcagaccggcgaagtgatcattgaaaccttcgaagaacgtggcaggagtccggcacaaatcccggcggtgctggtgcattctcacggcccgttcgcatggggtaaaaacgccgccgatgccgtgcataacgccgtagtactcgaagaatgcgcctatatgggtctattcagccgccagcttgcgccgcagctccctgcgatgcaaaacgaactgctggataagcactacctgcgtaagcatggggccaatgcctattacgggcagtaatccctcacgccggggcttcatcgccccggcactacgaattgatatgttccttgctgtaacgccgcttccacgctgctggcgttaaaccagtatgtttctgaaaaatctgccggaaatagccaacgtcattaaaccgtattgcatggagcaggccgacaacgtcgagtcactgcataacctgttgctgcccgccgatgcgccatttacgacatttgaaggcaagggattgttcagccataagatcctgattcagacgccaggttcccggtatgaacagagcaatccagagcaacaacctttgtggcattacgacggagcaccagccgcaccgacatccaccggtgaattaaaaacgccagctcaccccggtgacaaaggtaaaactctcattacgatcaatcatcgggctgtcggtaatctcttccggcagctcgctgtatcctgcgctcgccatcaatacgacgtgctctcctatcgggtattttgccgtcaggctgacatagggcacccaggcatcctgcgcggaataacttgccagaccgctacgacgggactcactctcactaatgccatagtaatagtcactgaaattctcgtcataatagagaacgcccagcgcaggtgtcaggctcagacgacctatctgcattttgtggaatacgcttagctcccccacccagccgttgctgttatccagaacgtccgcagctgcagaggctttcacggttccccaacgctcgtggtgataccaggcaacccccgccatagccgtactatcacgcttatcaagctgttgcatggcataatcgtcattatcggtagggtcaaattccagcggcatccaggatgcggtcaggctaagttcatttttttcactttggctcagaataaaacctaacgtggtctgacgaacataaaaagtatcaccttcataactaatcagcggaattgccttcgtattttcattataaccgcgataagggctttcattataagccgcaccagcaccaatggataattcagaagcagttgcgcttgccataaaaggcaacgcaaataacgccacaatattgcgattaattaacatgtccggtattccattttaaaataagataaaaaagagtcggcataataatgcttacaatttctccggtgcaagattcatatttatatagtaatatataaaattatatataattgggctgttgcgatgacaaaattacaacttaagtaccgggagttaaaaattatcagcgtaatcgctgccagtgaaaatatcagccatgccgcgactgtacttggcatcgcacaggccaacgtcagcaaatatcttgctgattttgaaagtaaagtgggtttaaaagtctttgaccgaaccacccggcagctgatgctcacaccttttggcaccgcgctgttaccgtacatcaacgacatgctggacagaaacgagcaacttaataattttattgcagattataagcatgagaaacgtggtcgggtcaccatctacgccccaaccggcataattacctatttatccaaacatgtaatcgataaaattaaagatatcggtgatatcaccttaagcctaaaaacctgcaatcttgagcgtaatgccttttatgaaggcgtcgaatttcctgatgattgtgatgttttaatcagctacgctccaccaaaagatgaaagcctggttgccagttttattacccaatatgccgtaaccgcttatgccagccagcgctatcttgagaaacatcccattagccgtcctgacgaactcgaacatcactcctgtattttgatcgacagcatgatgatcgacgacgcgaatatctggcgcttcaacgtcgccgggagtaaagaggtgcgggattatcgcgtgaagggaaattacgtttgcgacaacacgcaatctgcgctggagctggcacgaaatcacctggggattgtgtttgcgccagacaaaagtgtgcagagcgacctgcaagacggcacgctggtgccctgctttcagcaaccctatgaatggtggctggatctggtggctatcttccgtaaacgggaataccagccctggcgggtccagtatgtgctggatgaaatgctgcgtgaaattcgccaccagcttgctcagagccagcaactgcggcctgaacaagcggcggaaagcgaagattaatgatcgagataaaggtaatgcacccagctggtcatgcgtaatagcactttgcgcatcacgctgacatggctgaaatgatcagagtaaaccgccacctgggcgtaaataccgtctggtaaagcgctcaaatcagtgtgctcatccagttcaatggtcgcgataacgccatcactacccggcgctgtgtttaacgtctgtaaggtgccggtgctctgataagctccgccgggaacggctggactaatggctgccagcttaccgctgaataccttacctggcagagcattaaacaccacttccgcatcgtcgccaggagccagtcgcagcaaggagttctgacggaactgcgccacgatttgtcgtttctgatcgggtataaacaccatcaccggacgtagcggcaggctcgcggcataggtacccggacgaatcagtacctgggtcacataaccatcgctcggcgcacgcactatcgtctgctcaaggttatattttgcttccgcgagctgtgctttcaggctggcgatttgagaatgttcacccaacaccaggctatccagctggctctggatctgtttttgttccgccgcgctactcttcacggaggcttcctgcgccagataattttgccgcgccacatcgatatcgcgttcactaaacgggtttactttcgcctggctgccacgtgcgtaacgctgatactctttagcgaatttatcccgcgtggcctttgcctgctgagtattcgccgccatctcatctaactctgcgcccaacgcccgctgtttatgttctgcggtaacgatatccgccatcagccgatccacccgcgcctgataacgcgtcgggtccagtcgaaatagcacctcaccttttttaatcagcgtatttttcttatccgtcacttcaatcaccacaccagtcacctgtgggacaacaggaatagaaataaccgctttttgcgctttaaaggtatacggatggttatagttcattaacagaattagaccgctgacaataaatattccacccagggccgctgtgggaatggtccatttatttacgggaattttgaagatcttaaacattgcccatgcaaaagccacataggtcaaaataatcagtaaatccataagtattactcggcagaagaggatttgatgtcggcgagctgtttctccagcccggcaatgcgctgttgcagttgcataacggaactatcatggctttgcattccccatccccgctccgggcggtaaagcgtggcccaaatccacaaaaacggccagataacatgtaacgtaaaaagactcacccaaccagcaacatgaatggcgtcggcatgaggatgattacgttttttggcaatcaggtagggaatatcatgtaaaataatgatcccatagaagatcaccagaaatacaaaaataagcactcccagtgcaaaatagtccaggaacatatttccctcaaagaatataaaaaagaacaattaacgcatattatgaaatgccatgatgcagtgcaatttccttatttatataacgacatattgttttttatatactttcttaaatgtgctgtctggtttttcaacaggacgaggtttatcatattgaaatagtggaactattggccaaactaatgaataactccagtaaaacatccacagtacagattaagcgtattaaaccttcaattatctaccgtttattgctgattggcctcggatcaccaatggtgatttacggcctggttcgcccgctcaccatcgaaacgcgagattaaactcctgacaaaacacgccccagaaacgtacttctgttggcgtagtctgggttattgcgcacgtaggtttaaaacgtaaattgtaacaacgtgcgctttgtttatgccggatgcggcgtgtacgccttatccggcctacggtcaggttcccgtaggcatgataagacgcgtaagcgtcgcatcaggcaatgaatacccaatgcgaccagcttcttatatcagaacagccccaacggtttatcgctgtagctcaccagcaggcacttggtttgctggtaatgctccagcatcatcttgtgggtttcgcgaccgataccactttgtttgtagccaccaaacgccgcatgtgccgggtaagcgtgataacagttggtccacacgcgcccagcctgtatgccgcgccccatcttataggccagattaccgttgcggctccagacgcccgcgcccaggccatattgcgtatcgttcgccagctccagcgcttcttccatcgttttgaaggtggtcaccgccagcaccgggccaaaaatctcctcctggaacacccgcatattgttctgaccaaacagaatcgtcggttcgaggtagtagccgtctttcagttcaccttccagcagcttgcgccgcccgcctgtgagcacgtcagcgccctcttttttaccgatatcaatgtagttgaggatggtttccagttgcccgtgagaaacctgcgcgcccatttgcgtcacgctgtcgagcgggttaccgctacgaatgctttcgacacggcggatggcgcgttccataaagcgttcgtagatagattcctgcactaaagcacgactcggacaggtgcaaacttcgccctggttaaaggcaaacagtgcaaagccttccagcgctttatcgaaaaaggcatcttcttcatccatcacatcagcaaagaagatatttgggctcttaccgcccaactccagcgtcaccggaataatgttttgcgttgcgtattgcataatttgttggcccacttccgtactgccggtaaacgccactttggcgatgcgtttgctggtcgccagatattcgccaattaccccacctgcgccattgaccacgttcaccacgcccggcggcagtaaatcaccgacaatttccattagcagcagtacagaaagcggggtaagacgtgcgggtttcagcaccacacagttgcccgccgccagcgcgggagccattttccagctcgccatcagcagcgggaagttccacgggataatctgccccaccacgcctaacggttcatggaaatgataggccacggtttcgctatcaacttcactgatcccaccttcctgcgcccgaatacagctggcgaaatagcggaaatggtcaatcgccagcggtacatccgcagcactggtttcgcgaatgggtttgccgttatcccaggtttcagctgtcgctaacagctcgaggttttgttccattcgatcggcaatcttaaacagaatcgccgcacgatcctgcacgctggtgtgcgcccatttatctttcactttgtgcgcagcatccagcgccagatcgatgtctcgtttgccgctagacgccacttcgcacagcagctgcccggtcaccggcgtcagattctggtaatactcgccgtcggcaggggctacccattcgccgccaataaagttgtcatagcgggcttttaacttgagggggaaaccatactcgccgggcttaatctgtgcactagggggattattggtcatgatcgtctccttgcggtgtgaggtataacaagggtagacgtgactggcgaaatcttcgccagtcggtaacagctttacgacagctatcacgaatttacgggcaagggttacagagatagttgaaaaagcggctaacaatttgccagccgttgtggaaatgatgattacatcgctgcgcgataaatcgccacaatttcttcgtgagttgcctggatcgggttagtaaagccacaggcatctttcagggcattagtcgccaataccgcgaaatcttcttctttcacgttcaggtcgcgtaggcctgccgggatatccactttcttcgccagttcacggatggcgttaatgcaggcttcagcaccttccgcgtcgtttttacctgtcacgttcacgcccattgcagcggcacagtcacgcagacgtgcagcggcgactttgctgttgaatacctgaacgtgcggcagcaaaacggcgttacatacaccgtgtggcaggttgtagaaaccgcccagctggtgcgccatcgcatgaacataacccagagaagcattattgaacgccataccggcgaggaactgggcataagccattgcttcacgcgctttcgcattactgccatcttcaacggctaacggcaggttttcggcaatcatggtcacggctttcagtgcacaagcgtcagtgatcggcgtggcggcaatagaaacatatgcttcgatagcgtgcgttaaggcatccatacccgttgcggcggtcagactcttcggcataccaatcatcagagaggagtcattgacagaaagcagcggagtgacatgtttatcaacaatcgccattttgatatgacgcgcttcgtcagtgatgatgcagaaacgggtcatttcagaggccgtacccgccgtggtattgatggcgatcatcggcagctgcggttttgcagagcggtcaacgccttcgtaatcgcgaatatcgccgccattggctgccaccagcgcaataccttttgcgcagtcgtgtggagaaccaccgcctaaggagatcacgctatcgcaattattctctttaagtaatttcaaacctgcggcgacgttttccgtggtggggttaggttgggtgccatcataaataacgctaaaaatattgcgttcttccagtgctttttgcacatcgcccgccatacctaatttcgttaacatattgtcagtgacaattaaggtacgggtaaatccataatctgccatcatattcattgcatcagtcaaactatcagcgccgatgacattcacagaaggaataaagaacgtactagctgccataacacactcctgaaagtgtaaaaaagggcgggcagcttactgaggattttcattcgaaaatatgatcagtattattgattatcaaaattaatctaataaaaagcacattgtattcattaaacaatgtgctttttttaaattcataagaattttgtattaatttattttaaaacttaattaatcatttccttatttttccggaaataataatgcgtcgcgcaataaatgatcatttccacgacgacgcgtaaagccaatgcggtcaaaatattccagaatctgaattgccagctttcggcctacgcctaagcgatcgcggaaatccgccgcgcaggtactaccacactcctgatcgagatcgcggatcatattggcaaactcgacaatccgatcgttacggtaataacgatctttaacgatcgcggtaattattccttgctgcgccgcctggcgtagagtcaggcgcattgcctgctcgtcggttcccgtctcttttgccaggtcacgcacccaccacggttcgtcaccaaacagtggctctgctttttgccagatggcctgctgctcttcgctgaagcccgctttgtgatctggcagatgcagccagccgtgatggctgtggatgtcgccgctttcgcgcatcttttcaatcagcaacagtaccagcgcttcatcttccattggcaacgccatacgtcgcagacgttcgcgcccagggccaggttcatcgcgatgttgctcatgataagtcgctaatgtgtcgagaattttccgctgccagcgggcggcaaccggcgcattcaacaagctataaccagcctgaatataaccaggctgttgcagcaattcgcgcatcccttcgccgttgagctggcgcgcccaggcgaaatccgcaaggttaaccgcgccgcgttccagatgaacagataacgcatcggcatcgctctgcgcccgtgcaagagacgccagccattgcagatattccggcttacgtttaccgcgacgcggcgggttaagcatcacgacgcgcgctccggccagcgtgttgcgggcagagatatcgcgcaataccaggcggtcgttatctgccagccataacggggtgtcgaagaccagttcagcaaggttatcttccagcagactaacgcgtcccgtgacgtggctggcggcgtggtgaatatgcagcggctgccactgggtcagcggtgtatgggtttgaagctcgacaatcacccgtgtgaacggctctggcggcacatcggcaagcagccagtcgccacggttaatctgctctttttccgcatcacccgcgatgttaagcgcgatacgctgcccggcattggcggtttctgttggctggttttgcgcatgcagcgcacgtacacgcatcggtttatttacaccagtcagccagagactatcgcctaccttcacttccccgcttaacgccgtaccggtgacgaccagcccggcaccttttacggtaaatgcgcggtcaatcgcgaggcggaaactatgttggctggcgtgctcgcgttccggcaactgaagcagatgctcgcgcagggcatccattccccgaccttcggttgctgcggtgataaacagttttgcctcagcaaaaccgtattcccgcagaacctcctttacctggcgttcaacctcatcaacacgcgcttcgtccacgcgatcggctttggtcagcgccactgtcagcatcgggttaccggtcagctgcaaaatcgccagatgctcacgggtctgtgccatcacgccgtcatcgcacgccaccaccaacagcgcgtgatcgataccaccaacgcccgccagcatgttggaaagaaacttttcatgaccgggaacgtcgataaaaccaggcacgcgaccatccggctgcggccagtaggcatagccgagatcgatggtcatgccgcgctttttttcttccggcagacggtcagcatttacgccagtaatcgcctgcaataaggttgttttgccgtggtcaacgtgtccggcagtcgcaataatcatttcaacaacatctccaaaaaccgttgctcatcttcaaggcagcgtaaatccagccacaatcgtccgtcataaatacgaccaatcaccggcactggcaattcacgccagcgggcggctaaactctcaaggtggctaccgcgtccatcatggggtgtaaacgttaatgccgcgctcggcaggcgatcaaccggcaggctaccactgccaatctggctaagacatggcataacctgtaccgcaaactccgcgccgtaatgtgcggcaaggggggcctgtaaacgttgtgcctggatttgaatgacctctgcgctgcgggtaagcaggcgcagggtcggtaatttttcactcagagcttcagggtgtaaataaagacgcaacgtggcttccagcgccgcgagggtcattttatccgcgcgtaatgcacgcttcagcgggtggctttgcaggcgggcgatcatctcttttttaccaacaataattcctgcctgcggcccgcctaacaacttgtcgccggagaaactcaccagactgacgcccgccgcaatcaactcctgcggcattggctctttcggcaaaccgtactggctaagatcgaccaggctgccactgcctaaatcagtcactacgggaacatccagctctttgccgagcgccaccagttccgcttcatctatcgctttggtgaacccctgaatgctgtagttactggtatgtactttcatcaacagtgcggtattttcattcaccgcctgacgataatcattcgcgtgcgtgcggttggtggtccctacttcgtgtagggtgcagcctgcctgacgcataacatcgggaatacgaaacgcgccgccaatctccaccagttcgccgcgagataccaccacctcttttccgctggcagtggccgccaacatcaataacaccgccgccgcattgttattgacgatacaggcatcttccgcccccgtaatacggcacagcagctgcgccagcgcccgatcgcgatgtccgcgtccggcgtcgtccagatcatactcgagggtcactgggctacgcatagcctgcgcaacggcttccaccgcggcttccgcctgtaaagctcgcccaaggttggtatgcagcacggttcccgtcaggttgatcaccggacgcagcgcgctctgcgcttctttcgtcaaccgggcatcgacttcttgcgcccagttttcacaccacgcaggcagcgtctggctgccacgaatcacttctcgcgcttcgtcgagcatctgacgcaacaattccaccacgcgggtgtgaccataagtatcacgcaaagaaaggaaggagctatcgcgcaataagcgatcaatagccggaagttgactatagagggaacgcgtttcggttgtcataggaaacctggctgatcaaggccctctcacacggagaagggcgtttaacataaccacggattgtaacgtgagatgggtcaggaggacatatcgcgcatcaagcctttggcggttcggtgcgagcaaaactttcgcggctaaacaggttttcgaccagtttgactaagtgtgggcggtcgacacaccaacctggcgcaacgcggcggaaattgagatatccgacggcacaggcaatggcgatagtcgccagattgaccgtatcggttttgagtgtgccatcgaccagatatccttccagcacatccagactgcggttgattttctcccgctggcgtaacaattcatcttcagactgctgcgccgctggacgcgcctgttcacgcacgcttaccagcccggcatccataatgccatccgccagtgcctcaattttgcgcacccgcaagctctccagcggatcgcgcggcaacatcgccggagcgacattcattaattcaatatattcagcgatgatcgggctatcaaaccagcattcgccctcttcggtcaccagcaccggcacttttcctaacgggttaaattgcgccacgccgttgtccgcgttatagggcagttcattaataaattcgaaagttatgcccttttctaacaacagaatagaaagtttgcgtacaaacgggctggtgtagctaccgacgagtttcatgccgagtcctttgtgcgaggaaaaatatcagtatggctcaatgatccaaataaagataatgcatccagctggtcattcttagcagcactttccgcatcacgctaacatggctgaaatggtcggagtaaaccgccacctgggcgtagatgccgtcgggtaaggcatcgatatcatcgttagggtccagttcaatggttcccagcacaccgtccgtgccgggcacgaccgttaaactttgcaataccccctgcgcctgataagaaccgcctggcacgacaggtaaaatactagtcagtttgccgtgaaacacctgcccaggtagcgcgttaaacaccacttccgcatcatcgccaggtttcagacgtaacaggctgttttgccgaaattgggcgacaatttgccgtttttgctcggggatgaagaccatcaccggacgcagcggcaaggcagctgcgtatgtacctgggcggatcagtacctgagtaacgtagccattgctcggcgcgcgaatgacagtctgctcaaggttatattttgcttcagtaagttgcgctcttaagctcacaatctggctttgctcgccgttaaccatactgtcgagctggctctggatctgcgcctgctccgccacgctgcctttcaccagcgcatcctgcgcgaggaaattttgccgcgcatcgtcgatgtcacgttcgctgaacggattcaccgccgcctggctgcctttcaagtaacgttgataatttttaaacagacggtcgcgctccgcactaacctgggtggtgttggcctgcgcttcagtgagctgcgcacgcagcgtctttatattatgcgtcgccgtcatcaggtcagcctgaagtctgtcaactcgcgcctggtaacgaaccgggtcgagcttaaaaagcacctcgcccttttgaataagctgattattcttgtcagtgacttcagtaacaattcccgtcacctgtggcgtgatagggatcgctatcactgccttttgcgcggtaaaagtgtaagggtggttgtagttcatcaacaaaatcaaaccactcaccagaaacacgcctcccagcgccgccgtcgccagcgtccactgatttaccggaatgcggaagattttaaagaccgcccacgccagcgccacgtaagttaaaacaatcaatagatccataattagatctccgggaacgtggaatagtcagtctttttctcggcggcgagttgatgctccaaccgggaaattcggtcagaaagtgcggcgatttccgggtcagtcgctttctcctggctcgcaacatgactctgcataccccagccacgctccggttgatagagcgtcgcccagatccacagaaacggccagataacatgcagagtaaacaggctcacccagcccgccgtatgaatagcgtcggcatggggatggttgcgctttttggcaatcagataagggatgtcatgtatcgcgatgattccataaaaaatcaccagaaagacgaagatcagcactcccaacgcgaaatagtttagaaacatatctgcctcggattcacgtttatcagtgttgtttttgggctggcagccagaagggagtcaggctgatattttgacaataatccgggttcgcgattctcgccataacaccaaagaataatttttagaggtgatgagttgcttagttacataacgattgtatgacgaaggcataacatgctgtagatcacatcaggtgaacgccgtaagaaaatatcttgtgattcagatcacaaagattcaacaaaccatcaaaacaaaaatgtgacactactcacatttaaatgccatttttagcgaaaatcgccgccttgttgcttttttacacaagcgttttgtgatgaacgtcacgtcaattacctctctaccccctatatttatgtgattgatatcacacaaaaggccgtcgactggacagttaaccgattcagtgccagatttcgcagtatctacaaggtccggctacctctgccgccacattaacaaaaaacctcgggcttccagcctgcgcgacagcaaacataagaaggggtgtttttatgagttccgatattaagatcaaagtgcaaagctttggtcgtttcctcagcaacatggtgatgccaaatatcggcgcgtttatcgcgtggggtatcatcaccgcgttatttattccaacagggtggttaccgaacgagacgctggcgaagctggtcgggccgatgatcacttatctcctgccgctgctgatcggttataccggtggtaagctggtaggcggcgaacgtggcggcgtagtcggtgccatcaccaccatgggcgttatcgtcggcgcagacatgccgatgttcctcggttctatgattgcaggtccgctgggcggctggtgcattaagcacttcgaccgctgggtagacggtaagatcaaatccggttttgagatgctggtgaataacttctccgcaggcatcatcgggatgatcctcgctattctggcattcctcggcattggcccgattgttgaagccctgtccaaaatgctggctgcgggcgttaacttcatggttgtccatgacatgctgccgctggcgtctatctttgttgaaccggcgaaaatcctgttcctcaacaacgccattaaccacggtatcttcagcccgctgggtattcagcagtcccatgaactgggtaaaagtatcttcttcctgattgaagctaacccaggtccaggtatgggcgtgctgctggcgtacatgttctttggtcgtggtagcgctaaacagtctgcgggcggtgcggcaatcatccacttcctggggggtatccacgaaatctacttcccgtatgtgctgatgaatccgcgtctgatcctcgcagtcatcctcggcggtatgactggcgtgttcacgctgactatcctgggcggtggtctggtttctccggcatctccgggttctatccttgctgtactggcgatgacaccaaaaggtgcttacttcgctaacatcgcgggtgtgtgtgcggcgatggctgtctccttcgttgtctctgctattttgctgaaaaccagcaaagtgaaagaagaagatgatattgaagcagcaactcgtcgtatgcaggacatgaaagctgagtctaaaggcgcatctccgctgtctgctggcgatgtgactaacgacctgagccacgtacgtaaaatcatcgttgcctgtgacgccggtatgggttccagtgcgatgggcgcaggcgttctgcgtaagaaaattcaggatgcaggtctgagccagatttctgttactaacagcgcgatcaacaacctgccgccagatgtggacctcgtcatcactcaccgtgacctgaccgaacgcgctatgcgccaggttccgcaggcacagcatattagcctgaccaacttcctcgacagcggcctgtacaccagcctgaccgaacgtctggttgctgcccaacgccacacggcaaacgaagagaaagtaaaagacagcctgaaagacagctttgacgattccagtgctaacctgttcaagctaggcgcggagaacatcttcctcggtcgcaaagcggcaaccaaagaagaagcgattcgttttgctggcgagcagctggtgaaaggcggttacgttgagccggaatacgttcaggcgatgctggatcgtgaaaaactgaccccgacttatctgggtgagtctatcgcggtgccacacggtacggttgaagcgaaagatcgcgtactgaaaacgggcgtcgtgttctgccagtacccggaaggcgtgcgcttcggtgaagaagaagatgacattgcccgtctggtgattggtattgctgcccgtaacaacgagcacattcaggttatcaccagcctgaccaatgcactggatgatgagtccgtcatcgagcgtctggcacacaccaccagcgtggatgaagtgctggaactgctggcaggtcgtaagtaatccaatcccaccctctccacatggagaaggtggggttaattgcctgatgcgctacgcttatcaggcctacaggatgcatcacaatttgttgaatttgcacgttcttgtaggccggataaggcgcttacgccgcatccggcgctgcccctctcctcacggagagggtttgggtgagggaaaagcctcaccccagccctctcgggtaaaaacattgatgaaggttaatactatgaaagcattacattttggcgcaggtaatatcggtcgtggctttatcggtaaactgctggcagacgcgggtatccaactgacgtttgccgatgtcaatcaggtggtacttgatgccctgaatgcccgtcatagctatcaggtacatgtggttggtgaaaccgagcaggtagataccgtttccggcgtcaatgctgtcagcagcattggtgatgatgtcgttgatctgattgctcaggttgatttagtcactaccgccgttggcccggttgtgctggaacgtattgctccggcaatcgccaaagggcaggtgaaacgtaaagaacaaggtaatgaatccccgctgaacatcatcgcctgtgaaaacatggtacgcggtaccacgcagctgaaaggccatgtgatgaacgccctgccggaagacgccaaagcgtgggtagaagaacacgttggctttgtcgattccgccgttgaccgcatcgtaccgcctagcgctagcgcaactaacgatccgctggaagtgacggtagaaaccttcagcgaatggattgtcgataaaacgcagttcaaaggcgcactgccgaacatcccaggcatggagttaaccgacaacctgatggcatttgtcgaacgtaaactcttcaccctgaacacgggtcatgctataaccgcgtacctcggaaaactggccggtcatcagaccattcgtgacgcgattctcgacgagaaaatccgcgcggtggtaaaaggtgcgatggaagaaagtggtgcagtattgatcaagcgctacggctttgacgctgacaagcatgcggcgtacatccagaaaattctcggccgttttgagaacccgtatctgaaagatgatgtagagcgcgtaggccgtcagccactgcgtaaactgagtgctggcgaccgtctgatcaagccactgctcggtacgctggaatatggtctgccacataaaaacctgattgaaggtattgccgctgcaatgcacttccgcagtgaagatgatccgcaggctcaggaactggcagcactgatcgctgacaaaggtccgcaggcggcgctggcacagatttccggtcttgatgccaacagcgaggttgtatccgaggcggtaaccgcttataaagcaatgcaataatggtggaccaggcgcaggacaccctgcgcccgaataacagattgagtgatatgcaggcaacaatggaacaaacccaggcctttgaaaaccgtgtgcttgagcgtctgaatgctggcaaaaccgtgcgaagctttctgatcaccgccgtcgagctcctgaccgaggcggtaaatcttctggtgcttcaggtattccgcaaagacgattacgcggtgaagtatgctgtagaaccgttactcgacggcgatggtccgctgggcgatctttctgtgcgtttaaaactcatttacgggttgggcgtcattaaccgccaggaatacgaagatgcggaactgctgatggcattgcgtgaagagctaaatcacgacggcaacgagtacgcctttaccgacgacgaaatccttggaccctttggtgaactgcactgcgtggcggcgttaccaccgccgccacagtttgaaccagcagactccagtttgtatgcaatgcaaattcagcgctatcaacaggctgtgcgaagtacaatggtccttagtctgactgagctgatttccaaaatcagcttaaaaaaagcctttcaaaagtaagcaacgtctgcttactgcccctctacctgcttcggccgataaagccgacgataatactccagacgttgtagatataacggcacgctttcatcgggtattccggacggaatcgcgttacggggaggaagttttttcagatactcccggaacgcctggctacttgccatgaaatctacggctttatcgataagaagcggaacgttttcacctaatttgcccatgatgatatctccgtattaccccgcgccgggaatgcgcggccgccaattttagtttaggttcccggtaaagatgacattaaggaaaacgtgctgaatcctcaataatcatccgctgctgtttattatcttttttctatagatttcttaattaatcaacgaattgcgcagtttttgagcatgttaatgattacgttacagaactattacaatgtcattagttgtgaacaaagcacctggtcgcgcatactaggggctataaatttatctttatcagaagccatcacatgaaagaagtcgaaaaaaacgaaatcaaacgcctcagcgatcgcctggacgccatccgccaccagcaggccgatcttagcctggttgaagccgcagacaaatatgccgagctggaaaaagagaaagccacgctggaagcagaaattgctcgcctgcgtgaagttcatagccaaaaactgagtaaagaagcacagaagctgatgaagatgccattccagcgcgcaattaccaaaaaagagcaggctgatatgggcaagctgaagaaaagtgttcgcggactggtcgttgtgcacccaatgaccgcactgggccgcgaaatgggcctgcaggagatgactgggtttagtaagaccgcgttttaagaacacagtatctacagggtgattctgcacattcctataggccgagtaaggtgttcacgccgcatccggcaagataaggcgctctggatcaacaacctaagggcaattctctgatgaggattgcccttttctttaccagacatctccccccacaagaattggccctaccaattcttcgcttatctgacctctggttcacaatttcccaattaaaactcacatcaatgttgccaatacataacatttagttaaccattcattgtcattatccctacacaacacaattggcagtgccacttttacacaacgtgtgacaaggagatgagcaacagactcattacacgatgtgcgtggactccaggagacctgcaatgaatctctggcaacaaaactacgatcccgccgggaatatctggctttccagtctgatagcaagccttcccatcctgtttttcttctttgcgctgattaagctcaaactgaaaggatacgtcgccgccagctggacggtggcaatcgcccttgccgtggctttgctgttctataaaatgccggtcgctaacgcgctggccagcgtggtttatggtttcttctacgggttgtggcccatcgcgtggatcattattgcagcggtgttcgtctataagatcagcgtgaaaaccgggcagtttgacatcattcgcagctctattcttagcataacccctgaccagcgtctgcaaatgctgatcgtcggtttctgtttcggcgcgttccttgaaggagccgcaggctttggcgcaccggtagcaattaccgccgcattgctggtcggcctgggttttaaaccgctgtacgccgccgggctgtgcctgattgttaacaccgcgccagtggcatttggtgcgatgggcattccaatcctggttgccggacaggtaacaggtatcgacagctttgagattggtcagatggtggggcggcagctaccgtttatgaccattatcgtgctgttctggatcatggcgattatggacggctggcgcggtatcaaagagacgtggcctgcggtcgtggttgcgggcggcagctttgccatcgctcagtaccttagctctaacttcattgggccggagctgccggacattatctctagcctggtaagtctgctctgcctgacgctgttcctcaaacgctggcagccagtgcgtgtattccgttttggtgatttgggggcgagtcaggttgatatgacgctggcccacaccggttacactgcgggtcaggtgttacgtgcctggacaccgttcctgttcctgacagctaccgtaacactgtggagtatcccgccgtttaaagccctgttcgcaagcggtggcgcgctgtatgagtgggtgatcaatattccggtgccgtacctcgataaactggttgcccgtatgccgccagtggtcagcgaggctacagcctatgccgccgtgtttaagtttgactggttctctgccaccggcaccgccattctgtttgctgcactgctcagcattgtctggctgaagatgaaaccgtctgacgctatcagcaccttcggcagcacgctgaaagaactggctctgcccatctactccatcggtatggtgctggcattcgcctttattagcaactattccggactgagtagtacactggcgctggcactggcgcacaccggtcatgcattcaccttcttcagcccgttcctcggctggctgggggtattcctgaccgggagcgataccagttctaacgccctgttcgccgcgctgcaagccaccgcagcacaacaaattggcgtctctgatctgttgctggttgccgccaataccaccggtggcgtcaccggtaagatgatctccccgcaatctatcgctatcgcctgtgcggcggtaggcctggtgggcaaagagtctgatttgttccgctttactgtcaaacacagcctgatcttcacctgtatagtgggcgtgatcaccacgcttcaggcttatgtcttaacgtggatgattccttaatgattgttttacccagacgcctgagtgacgaggttgccgatcgtgtgcgggcgctgattgatgaaaaaaacctggaagcgggcatgaagttgcccgctgagcgccaactggcgatgcaactcggcgtaagtcgtaatagtctgcgcgaggcgctggcaaaactggtgagtgaaggcgtgctgctcagtcgacgcggcggcgggacgtttattcgctggcgtcatgacacatggagcgagcaaaacatcgtccagccgctaaaaacactgatggccgatgatccggattacagtttcgatattctggaagcccgctacgccattgaagccagcaccgcatggcatgcggcaatgcgcgccacacctggcgacaaagaaaagattcagctttgctttgaagcaacgctaagtgaagacccggatatcgccagtcaagcggacgttcgttttcatctggcgattgccgaagccagtcataacatcgtgctgctgcaaaccatgcgcggtttcttcgatgtcctgcaatccagtgtgaagcatagccgtcagcggatgtatctggtgccaccggtttttagtcaactgaccgaacaacatcaggctgtcattgacgccatttttgccggtgatgctgacggggcgcgtaaagcaatgatggcgcaccttagttttgttcacaccaccatgaaacgattcgatgaagatcaggctcgccacgcacggattacccgcctgcccggtgagcataatgagcatagcagggagaaaaacgcatgattatttccgcagccagcgattatcgcgccgcagcgcaacgcattctgccgccgttcctgttccactatatggatggtggtgcatattctgaatacacgctgcgccgcaacgtggaagatttgagtgaagtggcgctgcgccagcgtattctgaaaaacatgtccgacttaagcctggaaacgacgctgtttaatgagaaattgagcatgccggtggcactggctccggtgggtttgtgtggcatgtatgcgcgtcgtggcgaagttcaggcagccaaagcggcggacgcgcatggtattccgtttactctcagcacggtttccgtttgcccgattgaagaagtcgcgccagccatcaagcgcccaatgtggttccagctttatgtactgcgcgatcgcggctttatgcgtaacgcgctggagcgagcaaaagcagcgggttgtagcacgctggttttcaccgtggatatgccgacaccgggcgcacgctaccgtgatgcgcatagtggtatgagcggcccgaacgcggcaatgcgccgctacttgcaagcggtgacacatccgcaatgggcgtgggatgtgggcctgaacggtcgtccacatgatttaggtaatatcagtgcttatctcggcaaaccgaccggactggaagattacatcggctggctggggaataacttcgatccgtccatcagttggaaagaccttgaatggatccgcgatttctgggatggcccgatggtgatcaaagggatcctcgatccggaagatgcgcgcgatgcagtacgttttggtgctgatggaattgtggtttctaaccacggtggccgccagctggacggtgtactctcttccgcccgtgcactgcctgctattgcagatgcggtgaaaggtgatatagccattctggcggatagcggaattcgtaacgggcttgatgtcgtgcgtatgattgcgctcggtgccgacaccgtactgctgggtcgtgctttcttgtatgcgctggcaacagcgggccaggcgggtgtagctaacctgctaaatctgatcgaaaaagagatgaaagtggcgatgacgctgactggcgcgaaaagcatcagcgaaattacgcaagatagcctggtgcaggggctgggtaaagagttgcctgcggcactggctcccatggcgaaagggaatgcggcataatcgtttgcgccccctcaccctaaccctctccctcagggagaggggaccgttcggcgctgtatgtactccctcactctgaaacgacaccgcactctttttttctccctcgcccctccggggagagggccggggtgaggggaaaaggccgcactgctcaccaattttctgctatcctgcccccgcactaagggggcagtatgctaaacatcgtactttacgaaccagaaattccgccaaatactggcaacatcatccgtctttgcgctaataccggctttcgtctgcatatcatcgaaccgatgggatttgcctgggacgataagcgcctgcgccgcgcggggctggactatcacgagtttaccgccgttacgcgtcatcatgactatcgcgcgttcctcgaagcagaaaatccccagcgcctgttcgccctcaccacgaaaggtacacctgctcacagcgccgtaagctatcaggatggcgattatctgatgttcggcccggaaacacgcggcctgccagcgagcattcttgatgccctgcccgctgaacaaaaaattcgcattccgatggtgccggacagccgcagcatgaatctgtccaatgcggtgagcgtagtggtgtatgaagcctggcggcagttggggtatccgggagcggtattgagagattaattactgtaggccggatagatgattacatcgcatccggcacgatcacaggacattagatcccatccccatactcaaatgtatggttaataccgttgaaatgctggtccatatccatacttggcttatcgctgtctggtttaccgacaatacgagccggaacgccagcggcggtggtatgcggcggcaccggttgcagcaccacggaacctgcgccaatcttcgcgccgcgcccaacttcaatattgccgaggattttcgcgcccgcgccaatcatcacaccttcacgaattttcgggtgacggtcaccaccagatttacccgtaccgccaagcgtcacagattgcagaatgcttacgtcgttttcaatcaccgccgtttcaccaacgacgatgcctgtcgcgtggtcaagcatgataccgcgaccaatttttgctgccgggtgaatatcgacctggaacgtcacagaaacctggttttgcagaaagattgccagtgcgcgacgcccctgattccacaaccagtgaccgatgcgataggcctgcaaggcatgaaaacccttcaggtataacaacggggtactgtatttatcgactgccgggtcgcgggtacgcaccgcctgaatatcacaggccgcagaggcgatcatttccgggtcagcggcgtaggcttcttccaccacttcacggatagcaatagcaggcataattgggctactcagcttgttcgccagcatgtagctcagtgcactgccaaggttttcgtgcttgagtagcgtcgcgtggtaaaaactggccagcattggctcacagtccgccagcgttctggcttcggctttaatattgttccagacaatttccagttcttcacagctcattgcttactccacacgatgagataatgaccggcccgttctgcgcgggccgggtcatagcggtaacaaaggttccctggggttagtggctgctgcgctcgtccttgcgtgcacgacctagtaaagtcaatgctgcctcgcgcgcgttttttccgcaatataatacttgataaatttcctcggttattggcatttcaacgccgaagcgatgcgccagttcgcggacttctttcgtattgcggtagccttccaccacctgaccaatcttctcctgcgcgctttgtacatccatgccctgaccgagcatcatgccaaaacggcggttacggctctggttgtcggtacaggtaagcaccagatcgccaagccccgccatgcccataaaggtggcagggtcggcacccagcgccgcaccaagacggctcatttcagccagcccacgggtgatcagcgccgtacgcgcattcgcaccaaaaccgataccgtcggacatccccgcaccaatggcaataacgtttttcaccgcgccgccaagctgcacgccaatgaaatccggattgctgtaaacgcggaaacttttgccgcagtgcagcagctgctggagatcatcggcaaaggtctgatcggtgctggccaggctaatagctgtcggtaaacctgccgccagttctttcgcaaacgttgggccagagataaccgccagcggaatttgatcgcctaaggcctcacgcgccacgtcctgtaacagacgtccggtttccgcttccagccctttggtcgcccacaccagacgcgcatcaggacgcatcagtggtttaatctggcgcagcacttcaccaaagacatggctgggtacgacgacgagaatattacggctggctgccagcgcagtggcgagatcgctttcaagatggagcgtatcgggaaaaggcacatcggggagaaacgcggcgttacagcggtcgcgttcaagcgttgcgatatgttcagggtcatggccccagaggacaacctcgtggccatttcttgccagggtgatggcaagagcggtgccgtagctgccggcaccgatcacagtcatactagcattacgttggttcatcaggcatcctgatgttcttcagtaccttcgccagcctgctgctgcaaatagttcatgaacagcgcatcgaagttaaccggcgcaaggttcagttgcgggaatgtaccgcgggataccatgctggtgatgcactcacgagcatacgggaacagaatgttcgggcagtatgctcccaggcaatgcgccatctgggtgccttcgatacccgcgatggagaaaataccgccctgctgaacttcacacaggaacgcggtttcttcgcccaaagaggccgttacggtaacacgcagtaccacttcgtatacgtcatctgccagttgggaagatgccgtatccagatcaagtttaacttctggttgccaatctttctggaaaacgtgcggcgcgttcggcgcttcgaaagagatatccttggtataaatacgttggatctggaaagtcatttcagtgttgttttgttcactcatgtgtagaaaacccttaagtgttgtccttaaatactgcgcaatgtaatgccaacgttcacacgttatttcagcaggggatccagtccaccacgtgcatccaatgcatacaagtcatcacagccgccaatgtgctgtgcgtcaataaaaatctggggaaccgtggtgcgaccgctgcgtttgatcatctcttcacgcttggcggcgttgccatcgatcggcagctcctggaaactcacgcccttgctgctcagcagtgcttttgcacgatggcaatacgggcaggtttctttggtatagatttcaacattggccataaattagctcctgtttttttaccctgaaatttcatgttgcagggcggcagcaaaatggagtgtccccagaagcttataacaataagtcgctgggggcctaattgcagctaacggcctgcatcatgaaagacgacaggtaaattatttgccgcgcaccaaaggcaagttttcgccagcccagccagcgacgccttctttcagcacgaatacttgcgcaaaaccagctttcgtcagtgcgtttgcaggctcctggcactgcatgccagaaccgtctaccacgataaccggtttgtctttgtgcttctcaagctcaccaacattgttggctttgatttcgctcggcaacagattaatagaacctgcgatatggcctttacggaagtcatcacgctgacgtaaatccacaaccacagcgtcttctttgttgatcagacgcgtagcttcaccacgagtaatcaccttcactttgctggtcaggctcttaaacgtagtcacaagaaccgccaccagtaacgcgatccaggcgatactcagtatgggatgacggccaacaaattgcataatttcttgcatggggggtaacaactcccgacgtagtgattaaaaaaaccaggaaaggagtatacctgcgcggtgcggcaaatacagccagcgcgttaactggaatgcaattttgcggggcgcgacgaaaaaaaagcgtaaatctggcatcggcttgccgcgagcggtcgtatattttgatcttcagaggctattttatcgattcagctgtagtaaaattacgcaaattttgactcttgagtatgaggttgtcgcaatgttggtttctaaaaaacctatggtactggtgattctggatggctatggctatcgcgaagaacagcaggataacgccatttttagtgctaaaaccccggtaatggatgcactgtgggccaatcgtccgcataccctaatcgacgcttccggtctggaagtcggtctgcctgaccgtcagatgggtaactccgaagtaggccacgttaacctgggtgccggccgcatcgtgtatcaggacctgactcgtctggacgttgaaatcaaagatcgcgctttctttgctaatccggtgctgactggcgcggtagataaagcgaaaaacgcaggcaaagcggtacacattatgggtctgctctccgcaggcggcgtacacagccacgaagatcacatcatggcgatggtagaactggcagctgaacgcggcgcagaaaaaatctacctgcacgcattccttgacggtcgcgacactccgccgcgcagtgctgaatccagcctgaaaaaattcgaagaaaaatttgccgcgctgggcaaaggccgcgtagcgtccatcattggtcgttactacgcgatggaccgcgataaccgttgggatcgcgtagaaaaagcttatgacctgctgactctggcgcagggcgagttccaggccgataccgccgttgctggtttgcaggctgcttatgctcgcgacgaaaatgatgaattcgtgaaagcgaccgttatccgtgctgaaggtcagccagacgcggcaatggaagacggcgatgcactgattttcatgaacttccgtgctgaccgcgcgcgtgaaatcactcgtgctttcgtgaacgctgatttcgatggcttcgcgcgtaagaaagtggttaacgtcgatttcgtgatgctgaccgaatacgccgctgacatcaaaactgcggttgcttacccacccgcttccctggttaacaccttcggcgagtggatggcgaaaaacgacaaaactcagttgcgtatttccgaaaccgaaaaatatgcccacgttactttcttcttcaacggtggcgtagaagagagcttcaaaggcgaagatcgcattctgatcaacagtccgaaagtggctacctacgatctgcaaccggaaatgagctccgcagagctgaccgaaaaactggttgcggccatcaagagcggcaaatacgacaccatcatctgtaactatccgaacggcgacatggtaggtcacaccggggtgatggaagcggcggttaaagcggttgaagcgctggatcactgcgtggaagaagtcgcgaaagcggttgagtccgtgggtggacaactgctgatcaccgctgaccacggtaacgctgagcagatgcgcgatccggcaacgggtcaggcacacacggcacacaccaacctgccagttccgctgatttacgttggtgataagaacgtgaaagcggttgaaggcggcaaactttctgacatcgcgccgaccatgttgagcctgatgggtatggaaatcccgcaagagatgactggtaagccgctgttcatcgtggaataatccctccccatgaggggaaaggcgattaataccatgacacgggccgtgaaaccgcgcaggtttgcaatcaggcccatcatctacgccagcgttcttagcgctggcgtattgttgtgcgccttttccgcccacgcggatgagcgtgaccaactcaaatctattcaggctgacatcgccgcaaaagagcgcgcggtacgccaaaagcaacaacaacgcgcaagcctgctcgcacaattgaaaaagcaggaagaagcgatctctgaagccacccgtaagctgcgcgaaacgcaaaacacgctcaatcaactcaataaacagattgatgagatgaacgcgagcattgccaaactggagcagcaaaaagccgcccaggagcgcagcctcgccgcacaactggatgccgcattccgtcagggcgagcataccggtattcagctgattctcagcggtgaagaaagccagcgtggacagcgtttacaggcttatttcggctatctcaaccaggcgcgacaagaaaccattgcccagttgaagcaaacgcgtgaagaagtcgccatgcagcgtgctgaactggaagagaaacagagcgagcaacaaacgctgttatatgagcagcgcgcccaacaggcgaaactgactcaggcgctgaacgagcgtaaaaagacgctggcagggctggagtcttccatccagcaaggtcagcaacagttgagcgagctgcgcgccaacgaatcccgtctgcgtaacagcattgcccgtgcggaagccgcggcgaaagcgcgtgcagaacgagaagcacgtgaggcccaggcggttcgcgaccgccagaaagaagcgacgcgcaaaggcaccacctacaaaccgaccgaaagcgaaaaaagcctgatgtcccgtaccggtggtctgggcgcgccgcgtggtcaggcattctggccggttcgcgggccgacgctgcatcgctatggcgaacagctacagggtgaattacgctggaaaggtatggttatcggtgcttctgaaggtactgaagttaaagcgattgccgacggtcgggtgattctggctgactggctgcaaggctacggtctggtggtggtggttgagcatggtaaaggcgacatgagtctttacggctataatcagagcgcactggtgagcgttggtagccaggttcgcgcgggccagccgattgcactggtgggcagcagtggcggtcagggtcggcctagtctctatttcgaaattcgccgccagggtcaggcggtcaatccacagccgtggttgggaagataagttttgtttccatttcgtcgtaacgttcttgcatttgccgctctgttggcgctctcctcccccgtacttgctggcaaacttgccatcgtcattgatgattttgggtatcgcccgcacaacgaaaaccaggtgctggcgatgccttccgctatctccgtcgctgtattacccgatagtccgcacgccagagagatggcgaccaaagcgcataacagcgggcacgaagtgttgattcatctcccgatggcaccgttgagtaaacagccgctggagaaaaatacgctacgcccggagatgagcagcgacgaaattgagcgcattattcgtagtgcggtcaataacgtgccctatgccgtggggatcaacaaccacatgggcagcaagatgacctctaacctgtttggtatgcagaaagtgatgcaggcgctggagcgttacaatctttacttcctcgacagcgtaaccatcggtaatacccaggcgatgcgcgccgcgcaaggcactggcgtgaaggtgatcaaacggaaggtattcctcgacgatagccaaaatgaagcggacatccgtgtgcaatttaatcgcgcaattgacctggcgcgtcgcaacggtagcaccattgccattgggcatcctcaccctgcaacggtacgcgtgttgcaacagatggtttataacctgccgccagacattacgctggtgaaagccagcagcttgctgaatgaaccgcaggttgatacttctacaccgccgaaaaacgctgtgcctgatgcaccgcgtaatccgttccgtggcgtgaagctgtgcaaaccgaagaaaccgatagaacctgtttatgctaatcgcttctttgaagtattaagcgaaagcatcagccagagcacgctgatcgtttacttccagcatcagtggcaaggctggggcaaacagcccgaagcggcgaagtttaacgctagcgcaaattaattagcgcaaattaaaggcgctacgcgtaatgcgatggtggctccgcgttttgtcgcgccattgccataagcggaaagaccacagtaacgcctggtaaccgaccttcacgctgcgcacattggtaatcaggcgcttatacataccggaagtaaatatctcggcaatcatccgttggcgggtaagaatatccggctctttgcgcaccgcatggcaaacacgcaatgcctcgtaagttatttgctgatgaaattccggataaatcataattttgtcggcataatttcgatttaatttctccagcaggcgggtaatcttaatatagtgacgttgataattaaggtttttattcccttgtctatgcaaccgactcacactcgtattatgcagataatatttatataaactttgctcggtatatcgcgcacgcagcgcgttaaacatgaattctgttgtccagacaatatcctgatgatgtaatccggcaataaatttaatgttatttttaacaataacatcacggcgataaacccccatccagacaacgtgagtccaacggcggctagaaagccccatccgcagccagtccgggccggttaatacgccggtactgcgaaggcgatcggtggggatggattgccaggtttctcccgtttcacgaaaacaccagtcagcgttgcactgcgccacgtcgaggtcgtcctctaacgccatggtcatcagcgtttcgtacatggtgggatagacttcatcgtcagcatcgacaaaagcgacatatttgcccgttgccacttcaatcccacgattacgcgccacgcttgcgccagcattcgcctgatgcaacaaacgaacgtgcggatagttttctgcgtaatactttgctatttcaacagaattatccgtactaccatcgttaataataatgatttccagagcagtccaggtttgcgtaattaaagattccatacaagtgcggaaatcatcgcccgcattatataacggaataataacactaagtttattggtgctgttcatcataaattaccgacgacctctgaagttatcctgacgttttacaggctttgtattaagaaactattaagcctgtgagatattatttttacaggtgagagagtcacttcagggtagagagataatgagagcagctatataagagatcagcacaattacgaactctttattacactgacaggattttacatatttaacagattatcctcagataaaagggctggaataccagcccttgttcgtgttaatcccagctcagaataactttcccggactggccgctacgcatagcgtcaaagcccttctggaaatcatcgatagagaaacgatgggtaatgatcgggctaagatcgaggccagactgaatcagcgccgccatcttgtaccaggtttcaaacatctcacgaccgtaaatacctttaatgaacaagcctttaaagatcactttggtccagtcgatagacatatcagacggcggaatacccagcatcgcaatacggccgccgtgattcatggtgtcaagcatggtacgaaacgctggcggcgcaccggacatttccagaccgacatcaaaaccttcggtcatgcctaactccgccatcacgtcattgagattttctttggcgacgttaaccgcacgggtgatacccattttacgcgccagctcaaggcggtattcgttaacatcagtgatcaccacattgcgtgcaccaacgtgtttcgccaccgccgctgccataataccaatcgggcctgcaccagaaaccagcacatcttcgcccaccagatcaaagctcagcgcggtatgcacggcgttaccgaagggatcaaaaattgcggctaagtcatcggaaatattgtcggggattttgaaggcgttgaatgccgggatcaccagatattcggcaaagcagcccgggcgattaacaccaacgcctatcgtgttgcggcacaaatgggtacgaccaccacgacagttgcggcaatgaccacaggtgatatggccttcgccagaaacgcgatcgccgatcttgaagcctttcacttcctgaccaatacctaccacttcaccgacatattcatggcccacgaccatcggcaccgggatggttttttggctccactcatcccagttatagatgtgaacgtcagtcccgcagatggctgttttacggattttaatcagcagatcgttatgcccgagttccggtacaggaacgtcggtcatccagatgccctcttccgctttcagtttggataacgctttcatctcacatcctcaggcgataacgcccagttgtttaccaatacgcgtaaatgcttctactgcacgcgtaatttgctcaggggtatgcgccgcagacatctgggtacgaatacgcgcctgacctttcggaacgaccggatagaagaaaccggtaacgtaaatgccctctttttgcagctcacgggcaaatttctgcgccactaccgcatcaccaagcatgaccggaataatggcgtgatcggctcccgccagggtaaagcccgccgcgctcatttgctcacggaactgacgcgcgttcgcccacagacggtcacgcagttcgctgcccgcttcgaccatctccagtactttgatggacgcggcaacaatggccggtgccaggctgttggagaacaggtacggacgagaacgctggcgcagccactcaaccacttctttgcgcgccgcggtataaccaccagaagccccgcccagcgctttaccaagcgtaccggtgataatatcgacccggcccatcacatcgcagtattcatgggaaccacgaccattttcaccgacaaaaccgaccgcgtgggagtcgtctaccatcaccagggcatcatatttatctgccagatcgcaaacgcccttcaggttggcaatcacgccgtccatactgaacacaccatcggtggcgatcagcacatgacgcgcaccggcttcacgcgcttctttcagacgtgcttccagctcctgcatatcgttgttggcatagcgatagcgtttagctttgcacagacgcacaccatcaataatagacgcgtggttcagtgcgtcggagataatggcgtcttccgcacccagaagcgtttcaaacaggccaccgttagcatcaaagcaggaagagtagagaatcgcatcttccatccccaggaaggccgccagtttttgttcaagctctttatggctgtcctgagtgccgcaaataaaacgcacgctagccatgccgaaaccgtgagaatccattcccgcctttgccgccgcaatcagatcaggatgattcgccagcccgagatagttgttggcacaaaagttaatgacgtggcttccatcagccacagtgatatctgcttgctgcgcagacgtaataatgcgctcttctttaaacaacccttccgcccgtgcggtttccagatcgttggttaactgctgataaaattctccacgcattgcgattctccagacagggcaaattccagcacatattacccaaacttataggtcgcgacgagataacgcgttaacacttctgcaaaattcaggataaataacgtgtaacttgatgtctctcaacacctacagatagtagaaaaactgtacagttttggctgggcataatgatgattgattttactgcattgatataaaaagaaaaaatgatgccaaagcatcatttttcctatctcagttggtatcaaaacgctacccactaatggagggaaacttattttctactaaggaaaattctcagcgcctgcatttttgcccctaaagtgttactcctgaagcagcgaaacaaatcgaaccattttcctctccccagatagtttaggttgaagagatcggggcgtttgtaatagcacatgacaaaaatgccctggtcatcgtccacaatgttattatttagtgttattttttgactttccagaactaatttatagaattctttccatttatgctgactaccaacaattgcgcccccaataatatatacatgattgccaatcatgaaatcaaaaacctgttgttgagatgtgacagtaagccctttttttatagtgaaaagatgcatcttactttcatcaaatgggaaatcccaaattttcaatcctcgagttacatttggcttatggcaatagccaaaatctatccacgcaacaagaggcgttttcactaagcccatgttgatagctttatttacaaaataggccttaaggttacataccaaaacatactctggactccagtactctgggttttttaattgtcgaggctcaagtctatttgtaaagctctcatctttttgaattttttcgatacgacttctgatatatctaaatttcttttttatatcgataacgataaccgttgttggttttccgttgcgaatcgcttcaacccttggtttcaaatcgggagaagtgaaaataatcatctcattttcaagtgcggccagacgctcaaagtaactaaaataaacatcaacactacgagctagtttttcacggaaccctttattagcagtccaatcccctctaccaatgtcaaaatatgcagtgataattgtggtggaacttttcattactaataagaccattaatataaaaaaagaattatatcataaatattaatagaatgtatactgtatattatccattcaaatgcttccgttatttatcatacatcggaatattgatactaaagcactattcacatgcaaaaccaacatccgccatgaaggactagctaaaacccaaactagtttgttgcaattagcatccttgcacctctatgtaaagggctgaagggattcggatgtgatggtatgattacagacattcgtgtctgagattgtctctgactccataattcgaaggttacagttatgatcatcgttaccggcggcgcgggctttatcggcagcaacatcgttaaagccctgaatgataaaggcatcaccgatattctggtggtggacaacctgaaagacggcaccaagtttgtgaacctggtggatctgaatatcgcagactatatggataaggaagacttcctgatccagattatggctggcgaagagttcggcgatgtcgaagcgattttccacgaaggcgcgtgctcttccaccaccgagtgggacggcaagtatatgatggataacaactatcaatactccaaggagctgctgcactactgcctggagcgtgaaatcccgttcctgtacgcttcttccgcagccacctacggcggacgcacctccgactttattgaatcccgcgagtacgaaaaaccgttgaacgtctacggttacagtaaattcctgtttgatgaatatgttcgtcaaatcctgcctgaagcgaacagccagattgttggcttccgttatttcaacgtttatggaccgcgtgaaggccataaaggcagcatggcgagcgtcgctttccatctcaacacccagcttaacaacggtgaaagtccgaagctgtttgaaggtagcgagaacttcaaacgcgacttcgtctatgtgggcgacgtggctgatgtgaatctgtggttcctggaaaatggcgtttccggcatcttcaatctcggtactggtcgtgcggaatccttccaggcggtagctgatgctacgctggcttatcacaagaaaggccagatcgaatacattccgttcccggataaactgaaaggccgctatcaggcgttcactcaggcagatctgacaaatctgcgcgcggcgggttacgacaaaccgttcaaaaccgttgctgaaggtgtaacggaatacatggcctggctgaatcgcgacgcataagagctctgcatgaaaatactggtgatcggcccgtcttgggttggcgacatgatgatgagccaaagtctctatcgcacgctccaggcgcgctatccccaggcgataatcgatgtgatggcaccggcatggtgccgtccattattaagccggatgccggaagttaacgaagctattcctatgcctctcggtcacggagcgctggaaatcggcgaacgccgcaaactgggtcatagcctgcgtgaaaagcgctacgaccgcgcctacgtcttacccaactccttcaaatctgcattagtgcctttcttcgcgggtattcctcatcgcaccggctggcgcggcgagatgcgctacggtttactcaacgatgtacgcgtgctcgataaagaagcctggccgctaatggtggaacgctatatagcgctggcctatgacaaaggcattatgcgcacagcacaagatctgccgcagccattgttatggccgcagttgcaggtgagcgaaggtgaaaaaagttatacctgtaatcaatttagccttagtagtgaacgtccgatgattggtttttgcccgggtgcggagtttggtccggcaaaacgctggccacactaccactatgcggagctggcaaagcagctgattgatgaaggttatcaggtggttctgtttggcagcgcgaaagatcatgaagcgggcaatgagattcttgccgctttgaataccgagcagcaggcatggtgtcggaacctggcgggggaaacacagcttgatcaagcggttatcctgattgcagcctgtaaagccattgtcactaacgattctggcctgatgcatgttgcggcggcgctcaatcgtccgctggttgccctgtatggtccgagtagcccggacttcacaccgccgctatcccataaagcgcgcgtgatccgtttgattaccggctatcacaaagtgcgtaaaggtgacgctgcggagggttatcaccagagcttaatcgacattactccccagcgcgtactggaagaactcaacgcgctattgttacaagaggaagcctgacggatgcgggttttgatcgttaaaacaagcagcatgggcgatgttctccatacgttgcccgcactcactgatgcccagcaggcaatcccagggattaagtttgactgggtggtggaagaagggttcgcacagattccttcctggcacgctgccgttgagcgagttattcctgtggcaatacgtcgctggcgtaaagcctggttcagcgcccccataaaagcggaacgcaaagcgtttcgtgaagcgctacaagcagagaactatgacgcagttatcgacgctcaggggctggtaaaaagcgcggcgctggtgacgcgtctggcgcatggcgtaaagcatggcatggactggcaaaccgctcgcgaacctttagccagcctgttttacaatcgtaagcatcatattgcaaaacagcagcacgccgtagaacgcacccgcgaactgtttgccaaaagtttgggctatagcaaaccgcaaacccagggcgattatgctatcgcacagcattttctgacgaacctgcctacagatgctggcgaatatgccgtatttcttcatgcgacgacccgtgatgataaacactggccggaagaacactggcgagaattgattggtttactggctgatagtggaatacggattaaacttccgtggggcgcgccgcatgaggaagaacgggcgaaacgactggcggaaggatttgcttatgttgaagtattgccgaagatgagtctggaaggcgttgcccgcgtgctggccggggctaaatttgtagtgagcgtggatacggggttaagccatttaacggcggcactggatagacccaatatcacggtttatggaccaaccgatccgggattaattggtgggtatgggaagaatcagatggtatgtagggctccaagagaaaatttaattaacctcaacagtcaagcagttttggaaaagttaagtagtttataaaggtaaaacatgctaacatcctttaaacttcatagtttgaaaccttacactctgaaaagtagtatgattttagagataataacttatatattatgtttttttagtatgataattgcattcgtcgataatactttcagcataaaaatatataatatcactgctatagtttgcttattgagtctaattttacgtggcagacaagaaaattataatataaaaaaccttattcttcccctttctatatttttaataggcttgcttgatttaatttggtattctgcgtttaaagtagataatagcccatttcgtgctacttaccatagttatttaaatactgccaaaatatttatatttggttcttttattgttttcttgacactaactagccagctaaaaagtaaaaaagagagtgtattatacactttgtattctctgagttttctaattgctggatatgcaatgtatattaatagcattcatgaaaatgaccgcatttcttttggtgtaggaacggcaacaggagcagcatatagtacaatgctaatagggatagttagtggcgttgcgattctttatactaagaaaaatcatccttttttatttttattaaatagttgcgcggtactttatgttctggcgctaacacaaaccagagcaaccctactcctgttccctataatttgtgttgctgcattaatagcttattataataaaagtcccaagaaattcacttcctctattgttctactaattgctatattagctagcattgttattatatttaataaaccaatacagaatcgctataatgaagcattaaatgacttaaacagttataccaatgctaatagtgttacttccctaggtgcaagactggcaatgtacgaaattggtttaaatatattcataaagagtccttttagttttagaagtgcagagagtcgcgctgaaagtatgaatttgttagttgcagaacacaataggctaagaggggcattggagttttctaacgtacatctacataatgagataattgaagcagggagtctgaaaggtctgatgggaattttttccacacttttcctctattttagtctattttatatagcatataaaaaacgagctttgggtttgttgatattaacgcttggcattgtggggattggactcagtgatgtgatcatatgggcacgcagcattccaattatcattatatccgctatagtcctcttactcgtcattaataatcgtaacaatacaattaattaagaataaacaagtttaagaagtgagttaaaactcacttcttatctatacaacttaatctctttacactattagttaaagtttcagtatcgatatcttttaccgtatatgttggggatactatttgtatagatttatgatgattcggggaccaaattaaatggctgggatattccggagtacgactattagggtaaaatgcaagcgttggtttatgataagccgcagcgatatgaacaagagctgtatcaacagaaatgacaaaatcactatacttggtcaacgcaacggtataaataaactcatcaaatggtagtgtttcgatttcaagtattggtattgtcaataaatcttgcggtaacccggtaaatataatccgataattttcaaagtgtgttttcacttcttgatatataacttttatttgctcaaacgtaagacggcatattttttttgcacctaatggattaataatgactattcttgtatctccaataaattcttttattttatcttcaacatctactggtaaatgcaagtcgtagttggtggaaaatttaccctcaccataaatatgcttcagtatttctattgctcgtgtactcatatgttcttttaaacattcatcgtggggatggtaaaaactatagtaacgcttataccaatgatcaaaacccagaatgtaagaatcttttaaactacttaatattaagctatgcttaaaactgggcatagtttcaaaggggtctaatacaatatcgaactgtaaatcccgcagatgcttacatagagtaagcatttcaagaaaaccggtactttctttaatacagaactcaaatatatttttattattagagagaaattccccaccctttctatttgtgagaagagttattttaacccctttactataaagttcacgataaatgctacttaatacaattagatcaccaagtttattattatcatgaataataaggcaacttttaacttgtgctggatctgtaatttgattatttattttattacgaaataaaaaagaaaggaaattaatcttgattttgtttatataaaatcttttctttttgtgaaaagttcctaagcgcatttttataccatattattttagtttcaggatgattaattagcataagaatcggtactagttctatattgcattttttttcttgtcatatctttactttcttctgcactgatgtcttgaagtttaataaatggaattacatcgtaagaaatagctgtatcatcacttaaattataaatattaatatcttttacattatcatgcataaaacgaaaaaatggcaatattttgaataaatccctacttaattcgctgggcatgggatttttattctcatcatagaaacgagaacagctacccgttaaatcaagaccagaacaaataatccgcgcatacttaagactatatgcgatttgaattgcagcaaaggcaatagtatggcaactgcaataaccaagactaatgtccttgcaaaatccaaccagacgaccttttttagacaacggtacagagatcagcagttctttgtgaatctgtctcaaaatattaaatttaatcttctttataaaaccacctttttcccgacggtaaaaggaccgtaatacgaggcagttctggaggatataaagtttatcttctttggaagcgtgttcataaacgtcaacgtttactatggtataacgacttctctggctaaatttataaaaatcatcacgacgctgatgtaaaaatcggacatctgtaagtacatatataaaaggaacgatattattacttaacagatattgcgcagaaccattgacagcaataatatcctttgttcgtaatacactcaaaggtgttttttggcttgtagggccgctaagaaaaataataacatcatcagatattttattttcaatcaggttttcaacatcttttttgtcaatgtatctaatattcttcatgataaacctgtgaaataaataactccgcttaaaactgtcctggtgaagacatgtaattgtgggattttttttagcgcgctggtttccctttcaaacgccgcataaaattgcgcatttttttacgatatactaaaagataatagcctagatctctaatctcatttttaataccgtaatgacgctctaagtcaatacgatctttcgctttacgctgcgcactagcacgctttccggagagatcgataattcgaacctcaccattttttataatgaagttaccacgatgggggtcgccagaaaccatgccatgttgatgtaaggcattaatactttgctgaattttattttttagcgcatcatcaatatcgggcatatcacacaactctatgccatcaatatactcgatgatcatgatataagtatggacaaaacgtaaggttttccgttcagccaataaataaaagtcattgagtgtatttaacccttcatttcgtactttttgggtttgctcaaaaaggcgttcgtaataatcaccttttaacagagacttaaagaaacgttcgttacgcttaactttcggagaaaaaaccttaagaatcaatttaccgtaatcggtatcaataagcataacttttgtatcatcaatagaacgaaaaaccttgatgatatttatattataagacaagaagtcatttaatacattgaggtacttactattgttttcatcggtaaaaacaaccaagtctttgatcttgctcttctgaatcataataaaccagttaaatgttatttacggtaatattttcggcaaagataacagactcctgctataattcctgagatataatgatgttgcactaaaagatgtttatatcttttttaaattcaataattgatttcgcatctcgtggagagtcatctttccagggggaattttctaaagctattttatagtattttaccgatggataaattgcccatttgtgccacggtttagttgcacctgtataatgaataagaagagtactttctgtaatcagctttttatagttttgatgtgttttgtcttttaattcacttttaattgtataaattgtattgtactcacgaggcaaaaataatgtcatccctttcagtaagacattcataacatcctgatcagggtatttataaacattatctttactcataagaatagacaacgctttttctgttagttttgcgtcagcccattttcttaagtctaaataaacgacaccggaattaaagtactgcccaagtaattcaggatcagacaacctggataccgccttttcttgcattggctcaacatctttaacaacagcagcaaccgctccatttaaacccagatgtaatagttggctaatatcgcctttacaaacaacatctgcatcaagataaagcaaacgatcaagcgttaaacccaataattgaaatgcaaataaacggaagtacattgctcttgaccagacctgtgtacaaggcaagcactggagcttatcagtgttaattctatataacgtgattcttaattggttttgctctgcaagctttgcaattttttgaaaaaaaccatcattataaacatcagcaataatataaaaatcaagattaatatgtcgattatttaggacaattgatgtgatggaaacacctacaccatcaagataattagcatcgacaccataggcaacatttaaacattcagaagtatttatattagctagccgaaaatcccaggctttaactttatctatctctatggcaggaaatgagtccacaatgctacccttatatcattactttatagtttcccagttttaatgctttatcttttcaataaaataaaaaagatagttgctaaatccttttagatatctatgctttttaagcatatgttttgcgctatatcttaattgattgctattgttcggtttcagcaacgccgtattcttccatgggctagcattttttgcctccataaaggcttgacttacaggataatcccaggcccaatcatgccagggcttggttggcccgatataatggataaaaatagtatcgttggttactgggtttataaagctttctttgagttgataatttaagctgaactgggtgttatatttaatatcagcgaaaataagtttatccgccagcaacatatttaacacatcctgatcaggatgtgttatttttttgattatttctggctcatttagcattgcaatagctcgtgcagaaacctgctgagccgcccattgggcagtattaatcaataaaaaaccggagttaaagtaacctttagcaattcccgcaacacctaagctatgggcgcgtttttcccaccagtcagcttgcccttctgtaacaaccattgcgactttatcgtcaggaaaactgaaattaattagtggctcaatagtcccctgacaaatgatatctgcatccagataaaggactttaggcgccttattaataaagtaatctgcaataacaaaacgaaaatatattgcatgagtccaattcttagtgctaggcaaactgcgcagtcgatcaccattaatcagatatattttaattctggttttatactgcaacgccagggcatcaaaatacttacgatcatcatcaccaaaataatcagtaaaaatatggaaacacaatcgacttccttcattatattttaatatactagcaatgctaattccgcaaccaaatagaaagtttttgtcagttccataagcgatgtccagacaaagattttctgtttctactttatgatcataatcaataacactattaagaaactcagtttcctggaaaaacacctgctgcattatttcctccgggaaatagcagaaataattaccttatgtaatctatcgtaatacttgctttggtaaaattcatcgatgctcgcaggaattttttcatgttcgatatgaatttcacctgctatatatttatttagaagagttacaaaaccagcaatatctcccggttgatacagatggccattgacatcaggttgaataatgtcagcaggcccggagacacaatcggcactgatacaaggaatcccccagctcaaggcttcaagtagggtcattgggaaaccttcaaaagaactcgtgagcaataacgcactcactttttcaatatcttgctggaccaattcccagggatattgttgccaaccataccagacaattcgatcatcaatatttaattctctaccataagcctggcatttttcgaaatcggagccatcacccaatacatggagtttccagttacctttcgcttgacttaagccatcaagcaggtctttaactcttttctggccttcaaatttcatacgcccaacataaataaacgttgccgtttcaccttcctcgggcgcgggaatgacactgtctttagtttcgacgggattaaaaataacatttatcgtgctttctgctacacctcgattaatcatttgctgtttaatgccagagctgattgctaaatgatagtcggcacaggtgatatattcagcatgttttttgtgatctaaagaaaaatgtggccaactaaatactggcatatcaattccactttttttacgtgcttttgcggcaaacaggcaggagatcacatcaatacaaataacgatatctggttggtactcctgaagccatttacttagagcatgaatatgtttcgcccgacgcaaaaaacctaaacgaatattggaaaaactacaactgtatttaataccttccagccatcccttatccattttgtcattacgacaaaagaaaaacatttcactttggatatgttgttgcctgaaggtagtaataacatcacggatgacagtttccatgccgccaaatccagaaacagcttcgccgataaacgctattttcatagaaactctcattaattgagtaaaactcactgttttaacggttttatttgtctataaaatcagaaacaatcgtactcatcattttatctggactgaatttatataaactatcataatccattggtttaacagaactgttaataaaatactctaacttatcccaatcatcatgacctattataaaaaagcgagattcactatagatttcactaccaaatacatttatattattagtaattaattttttattgaaaaatagtgcctcaagtatacgaagagtccagccagattggttttctttggttatatcaacaattatattagcatttaatgttcttctaatattctcttcataagatatttgtttttcaatcaaatacttactagtcgtagaacttgtcttatctttgacaacattaaaatctagcttacatcctagtgttgttaatctctcggctaactcattaattatttgaagacgccctttatcacgaccaaggaaaaaacatattggctggctgttatttttgtcagataaactataatttctaatttcatccattcctataggaaaaaattgttctattgccttgatcttttcattccctataaatctatgctcaaaatcatatataatatcgaaataattcgcgttatcaagaataaaatcttcgccaacagtatttcttagaagcaaaactttatgacagttaatattttttaatatttgtttattgatacctttattaacaacactgtcattaatgataattatgtcatcttttttaatatcattgaggtaatgcttgatgaataatcgccccagccatgcattatccatccctattttacttatttttttattaatccagttatatttttttggtgttgttatattttttatcttgtacttttttttcaggtactgaatcatttttaattcataatctgcaacccaatttataaaataaatagtcataataaagttagttccagtacatactaataaatatttttataatcctttgcgttgtgttcgctctttaatacgctcggccttaacgcttgccatgttcaataaattctgttcaagagacaatattttgcgtaaaggcatcccaaaataaaccttcataaatcgccagatatctctttgcgtcaggccaatattcatactactgaaatataaaccaatcaggtctttatcgcgccagcggcgcggtacttttgcacgtatctgtgcccgatgcagatcgataacactaatttttaattcatcttcccggccagtaaatggcaaatgaagcaaaaagtggcaaatgtaacagtcgcggtgatttatccctgcagtatgcattttacgcaccatagttgctacacgtgcgatcagcatacgcttaacacgtatatcaggcgggttgactgcccaatcggcacaataatcttcaaggctaattgtgggagtgagatcttcggtaataataaaacttgcgcgagttaatggatttaaccctttttcgccaaacccaatgcccttcattgtatcaacgccaacatcactcaggcgatgaatagcgtgccactctctgtctgcgcccaaaacgggcatccgcaaactgagtagattttttataatctcttttaatgtcgtccccttgtgccatttaagaaaatagcttttcccggacagttcaaagcgtaatgtacgacgagtctccagttcacgaaagacctcgccgttcagttttttgacctctgcaaaagcatctttaccacgccaaagtgtggcaagcggctcttttaattcaaccatctaaaccacctgtaatgatatccgcggctttttctggcaagctatacaaatcctgagtatcggcataatggcgagcattctccgcccaggccattcgcaatgggctctgagttaacgctttacgtaaaacttcatttaattgttcctgagagaaaggttcagcgatgaccgttccacaattggcatccgcaatataatgcgcgtacccacataccgctgttgttaaaacaggtaacccagcagtgatcgcttctagaagaacgatacccgcggcttcctgataagcgggatgcagtaataaatcagcggctgccattaattcactcacatcattgcgaccggagaagaaatgcacattgctccgcacgccgagtttttctgccagcgcttcaaattttcgcggcttatcctgaccaacaacaaataaaagcgtattgtgacgtaaactttccggtaagcttgccaaagcttcaatactgcgatctacacctttacggccaaaatcacttccaacctgcagtaataagttttgttgctcttttatgccatttttctggcgataaatttcacggctgtttgggatttgctcactgtattttctgtccggataaataccgggaggaagaatttgaaaacgttcaggttcagtttgataatgcttctggaaatcggcgatttgcttatcggtcagcatcataagtttcgtgcttttaccctgctcgaaagtcgctcgctcaaatgcggcataatggcgatatcgacttgttaaacgatataaaaaacctttttcttgcgcaactttctcggcgtaacaaacatcagcggcaaaataaacatccaggccaggcatcttattaaacccaacaacgcgatctgcgggatgctctttgagatgattttgtacccaggcataatattctgcattgcgtccatggttggtatgggacttaactggcacctgaataagctcaaatgctttcgggcaatcgccttcccagctctgtgtatatacccgaacatggtggccccgtgcggcaactgtacttgcaatgcgcataaagtcacgttgaagcccaccaaatggaaaatatttatataaacaaaacgccacgatcataattgtgcattcctgtcagcactaggggcatcttctggcaacagcttttccgtagcggcgatcacatcctccgctgggataacagaaagatattttttgttgcggtcaagttcatgccgggtcggcattttctgataattccccgcccagaattgaataatattctcggtccagggacgccagaatacgtgatccgttgcaccaaatagactaatgactggcgttttcactgccgctgcaatatgtcccggcgcagaatccacaccaataaaaagcactgcatgatcaattaatgcacccagttcaggaaaacgtgttttacctgcaaggccagtaatgggttttgtttcgcaacctcgtgcaatctcatctacacaagcgagatcatctgcgctgggcccacaggttagcacaacctgatagcctcgctgttgcagcgcatcgataaccttagaaaatttatcgttatcccaacacttaaatatctgacgcgctgtcggttggatgacaacataatgatcttttacgcccagggcatctaattcccggcgcatcttcttccagcaatcttcggcgtaactcattgttgtgtcggtgtagaaatcggtaatacctaatggctcaaggacgcttaaattacgctcaacaatatgtgtaccgtgtattggcgctaagtgtgtgaagctttttttccaaataccatgctgccgatgaccataaagttggcttattttcatccgtgcaggtaaacaacgtaccagcagcgccaccatccactgatccgtaagattaatgaccaggtcataattattcgcacgcagagtttttatcaagctaagcacatttttaattttatcgaaagttcccgcacctttattgcttatcccatagagcgcattaatttccgggttttcagacaaaatagggatggtgtcctgataaagcagcatatcgatttttgcatcaggataattctgcttgagcgtactgatgacaggagtagttaataacatatccccatgatatcgcatctttatgaccaggatttttcgaaatggcttttccactagcgactcttttgtgtgattgtctggttaagttaagcagaaaaaagcacgctaccgccccaggctcaacagctacctgaatactgataacgcacttactttgacgtgctagtgtatcatttctttcgcagcaatccgacccgaatgatttttatacacaaaatatactttaatcataaaaatcaaatagataaaaaatagcatttcgataatgtcagtacggcctatgtagatttgaaaatggggccgagtttcaatgaatcgcataaaaatacaaaaaaaatgaagatgtagcggcagatcagaccaaactgaagctatttaagtcaaaaacgggaaaagtaatggtaaagccacagctaaatacatagaatccccagcacatccataagtcagctatttactatgctcgaattgctttacaccgcccttctctaccttattcagccgctgatctggatacggctctgggtgcgcggacgtaaggctccggcctatcgaaaacgctggggtgaacgttacggtttttaccgccatccgctaaaaccaggcggcattatgctgcactccgtctccgtcggtgaaactctggcggcaatcccgttggtgcgcgcgctgcgtcatcgttatcctgatttaccgattaccgtaacaaccatgacgccaaccggtagcgagcgcgtacaaagcgctttcgggaaggatgttcagcacgtttatctgccgtatgatctgcccgatgcactcaaccgtttcctgaataaagtcgaccctaaactggtgttgattatggaaaccgaactatggcctaacctgattgcggcgctacataaacgtaaaattccgctggtgatcgctaacgcgcgactctctgcccgcagcgccgcaggttatgccaaactgggtaaattcgtccgtcgcttgctgcgtcgtattacgctgattgctgcgcaaaatgaagaagatggtgcacgttttgtggcgctgggcgcaaaaaataatcaggtgaccgttaccggtagcctgaaattcgatatttctgtaacgccgcagttggctgctaaagccgtgacgctgcgccgccagtgggcaccacaccgcccggtatggattgccaccagcactcacgaaggcgaagagagtgtggtgatcgccgcacatcaggcattgttacagcaattcccgaatttattgctcatcctggtaccccgtcatccggaacgcttcccggatgcgattaaccttgtccgccaggctggactaagctatatcacacgctctagtggggaagtcccctccaccagcacgcaggttgtggttggcgatacgatgggcgagttgatgttactgtatggcattgccgatctcgcctttgttggcggtagtctggttgaacgtggtgggcataatccgctggaagctgccgcacacgctattccggtattgatggggccgcatacttttaactttaaagacatttgcgcgcggctggagcaggcaagcgggctgattaccgttaccgatgccactacgcttgcaaaagaggtttcctctttactcaccgacgccgattaccgtagtttctatggccgtcatgccgttgaagtactgtatcaaaaccagggcgcgctacagcgtctgcttcaactgctggaaccttacctgccaccgaaaacgcattgaggttgttatgcaaaaacgggcgatttatccgggtactttcgatcccattaccaatggtcatatcgatatcgtgacgcgcgccacgcagatgttcgatcacgttattctggcgattgccgccagccccagtaaaaaaccgatgtttaccctggaagagcgtgtggcactggcacagcaggcaaccgcgcatctggggaacgtggaagtggtcgggtttagtgatttaatggcgaacttcgcccgtaatcaacacgctacggtgctgattcgtggcctgcgtgcggtggcagattttgaatatgaaatgcagctggcgcatatgaatcgccacttaatgccggaactggaaagtgtgtttctgatgccgagcaaagagtggagctttatctctagtagcttggtgaaagaggtggcgcgccatcagggcgatgtcacccatttcctgccggagaatgtccatcaggcgctgatggcgaagttagcgtaacgtttatgccggatggtatgccatccggcgcgcatgaattacttctggcactgccgacaataaaacgttgcccgctgcgcatgtttagtcgccacaatcggcgtaccgcacacccgacacggctcaccttttcgcccgtaaacctgcaattcctgagcgaaatagcccggtttaccatcactttgcagaaaatctttcagcgttgtaccaccctgctcaatgctacgcagcaacaccgctttaatcacccgagctaacaattcacactctgccaggctcagactactcgccagccgatccggatggatccccgccgcaaacagactttcgctggcatagatattccctacccctaccaccagcttgttatccatcagccacggtttaatcgccgtttttttcttcgcgcacttctgatgcagatactcaccattgaaatcgtcgctaagcggctccggtccaagatgggtcagcacattatgcccttccagctctttggtccacagccaggcaccaaagcggcgcggatcggtgtagcgcagcactttgccgttgctcatcaccaaatccacatggtcatgcttttcagggggaagttcttctggaaggatgcgcaggctgccagacatccctaaatgaatgataatccagccctcaggcagctccagcagcagatatttagcccgccgctgcacgctaagcactggttggtcgcttaaacggtagatctcttcactaaccggccagcgcaagcgtccgttgcgcaccactgcatgaagaatggttgcaccaacgagatgcggttctatgccgcggcggctggtttcaacttcgggtaattcaggcatagcatctccaggaatgaacagatgcagtcaatatgggggcaagcagataacaaaaaaccccgccggagcgaggttttttgttacatcaaagcgagaattatttgattttcgcttctttgtagatcacgtgctggcgaacaactggatcgaattttttcagttccagtttttccggcttagtacgtttgttcttcgtagtggtatagaagtgaccagtaccagcagaagaaaccagcttgattttctcacgaatacctttagccatgatttatttcctctaagtacttagtacttttcgccacgggcacgcagttcagccagaactgtatcgatgccttttttatcgattacacgcatacctttagcagatacgcgcagggtgacaaaacgcttctcgctctcaacccagaaacggtgagagtgcaggttcggcaggaaacggcgtttagtcgcgttcagtgcgtgggaacggttgttaccggtcaccggacgcttgccagtaacttggcagactcgggacatgtctattctccaaaaatcaaattagctcgagcttcgtatggggtattggcgcctcgtcaggctttacagcccggtcatcgcagttctatgtgaactctcgattgccaggcccaaatgccaaacccgagattctcaaaggtggcgtagtatacgctgactcagcgatgtgctcaagtcccgaacagacaaagatcccgaaggatcgcgcatagcgggttaaatccagccgcgttcggcaaaagaaacatactctccacgcccaatcacgatatggtcgagcacgcgtaaatccatgaactgacaactctttattatccgttcagtaatgagtttatccgctttactgggttcagcacaaccgctagggtgattatgtgcaaggatcagcgcgctggcgtttatttttatcgcttcgcggataatttcccgaggatggacttcaacatggtttagcgtgccggaaaaaagacgcctatgcgttataacccggtgttgggagtcgagaaagatcaccataaagatctcccgctcctcacccgtgagctggctttgtaaaaattccctcgtcatctccgggctgagtaaagggctttcttcacgcatccgcacgttgtagtaacgccgcgccagttcagcaatcccctttaactgggcaaatttcgccacgccaattccatgaacgccactaaattgttcatattcagaggttaacaagccataaagagagccgaaattctccagcatctcttttgccagggttaatacatctttaccgcgcgttccggtacgcagaaatagcgccagcagctcgacatccgttaaggcgctaataccaaacttcagcattttttcgcgcggcatcaacagctgactattgtttttcaccttcacctcctttgtggtgctcgcatcctgtcatagccgtttcgttaaatcgacggccagttttcaatcctggaaagcgcctcgcaaagtgaatctcaggtgaaggcacgacaacaaaagtattgtgataaaatcgccaacttctggtgtcaccctacaggaaaaatcatcatgagcctggccggtaaaaaaatcgttctcggcgttagcggcggtattgctgcctataaaacccctgaactggtgcgtcgtttgcgcgatcgcggggccgacgtccgcgtagccatgaccgaagcggcaaaagcctttatcaccccacttagcttgcaggcggtttctggttatcccgtttccgacagtctgctggacccggcagccgaagccgctatgggccatattgagctgggtaaatgggctgatttagtgattctcgcccctgccacggcagatttgattgcccgtgttgctgccggaatggcgaatgacctggtaagcacgatttgtctggctacacctgcgcctgtagccgtgctccccgccatgaaccagcagatgtaccgtgccgctgccacgcagcataatttagaggtgcttgcttcccgtggtttgctcatctgggggccagacagtggcagtcaggcttgtggtgatatcggtcctgggcgaatgctcgatccgttaaccattgtggatatggcggtagcgcattttagccccgtcaacgacctgaaacatctgaacattatgattaccgccggcccgacgcgtgaaccgctcgatccggtgcgttatatctctaatcacagctccggcaagatgggttttgctatcgccgccgccgctgcccgtcgtggcgcgaacgtcacgctggtaagtggtccggttagtctaccgacgccaccgtttgttaaacgtgttgatgtgatgaccgcgctggaaatggaagccgccgtgaatgcttctgtacagcagcaaaatatttttatcggctgcgccgccgtggcggattatcgcgcagctaccgtggccccagagaaaatcaaaaagcaggccacgcagggtgatgaattaacaataaaaatggttaaaaaccccgatatcgtcgcaggcgttgccgcactaaaagaccatcgaccctacgtcgttggatttgccgccgaaacaaataatgtggaagaatacgcccggcaaaaacgtatccgtaaaaaccttgatctgatctgcgcgaacgatgtttcccagccaactcaaggatttaacagcgacaacaacgcattacaccttttctggcaggacggagataaagtcttaccgcttgagcgcaaagagctccttggccaattattactcgacgagatcgtgacccgttatgatgaaaaaaatcgacgttaagattctggacccgcgcgttgggaaggaatttccgctcccgacttatgccacctctggctctgccggacttgacctgcgtgcctgtctcaacgacgccgtagaactggctccgggtgacactacgctggttccgaccgggctggcgattcatattgccgatcctagtctggcggcaatgatgctgccgcgctccggattgggacataagcacggtatcgtgcttggtaacctggtaggattgatcgattctgactatcagggccagttgatgatttccgtgtggaaccgtggtcaggacagcttcaccattcaacctggcgaacgcatcgcccagatgatttttgttccggtagtacaggctgaatttaatctggtggaagatttcgacgccaccgaccgcggtgaaggcggctttggtcactctggtcgtcagtaacacatacgcatccgaataacgtcataacatagccgcaaacatttcgtttgcggtcatagcgtgggtgccgcctggcaagtgcttattttcaggggtattttgtaacatggcagaaaaacaaactgcgaaaaggaaccgtcgcgaggaaatacttcagtctctggcgctgatgctggaatccagcgatggaagccaacgtatcacgacggcaaaactggccgcctctgtcggcgtttccgaagcggcactgtatcgccacttccccagtaagacccgcatgttcgatagcctgattgagtttatcgaagatagcctgattactcgcatcaacctgattctgaaagatgagaaagacaccacagcgcgcctgcgtctgattgtgttgctgcttctcggttttggtgagcgtaatcctggcctgacccgcatcctcactggtcatgcgctaatgtttgaacaggatcgcctgcaagggcgcatcaaccagctgttcgagcgtattgaagcgcagctgcgccaggtattgcgtgaaaagagaatgcgtgagggtgaaggttacaccaccgatgaaaccctgctggcaagccagatcctggccttctgtgaaggtatgctgagtcgttttgtccgcagcgaatttaaataccgcccgacggatgattttgacgcccgctggccgctaattgcggcacagttgcagtaatatgacgccggatgacttttcatccggcgagtttctttaaacgccaaactcttcgcgataggccttaaccgccgccagatgttccgccatttccggcttctcttccaggtaagcaatcaggtctttcagggtgatgatagagatcactttgcagttgtaatcacgctcaacttcctgaatcgcgctaatctcgccgcgcccgcgttcctgacgatcgaggctaatcaacacgccagcaagcgtcgcgccattggcctgaataatctccatgctctcgcgaatcgccgttccggcggtgatcacatcatctaccagcattacgcgtccttgtaacgcgctaccaaccagattgccgccttcaccgtggtcttttgcttctttgcggttaaagcagtacggcaggtccaggtcgtgatgctccgccagtgccacagcggttgtggtggcaatcgggatccctttgtaagcagggccaaacagcagatcgaactcaatgccggaatccaccaacgcttcagcgtaaaaacggcctaacagtgccagatcgcgcccggtattaaacagcccggcgttgaagaaataggggcttttgcgcccggatttcagcgtaaactcgccaaactttaacacctgcttgctaagcgcaaattcaataaactggcgctgatatggtttcatgccttcgctcctcatcttacttttctacagacaaaaaaaaggcgactcatcagtcgccttaaaaatcagtttgccagcgccgccttctgcgtcgttacaatggattgctttcccctcgggccagagccaacaagatgagtagctcttcatgggtgaacggctcgccttctgccgtcccctgcacttcaatgatgcgcccgtcttcggtcatcactacgttcatgtcggtctctgcggcagagtcttcaacgtattccagatcgcaaaccgcttcgccgttcacaattccgacagaaactgcggctaccatccctttcatcggattggttttcagcttgccgttttccaccagcttctgtagcgcatctaccagcgccacgcaggcacccgtaatgctcgcggtacgcgtgccaccatcagcctgaagcacgtcgcagtccagcgtaatggtgaactcacccagcgctttcaaatctactgccgcgcgaagagcacgggcgatcagacgctggatttccattgtgcgtccaccctgcttacctttcgccgcttcacgagcgttacgggtgtgggtagaacgtggcagcatgccgtactctgcggtgatccagccctggccctgacctttcaggaagcgcggcacgccttcttcaatagaggcggtacacaacactttggtatcgccaaattcgaccagcacgctgccttctgcatgttttgtatagttacgagtcagggtaacgggacgcacctgattattgctacggcctgctggacgcatattgaaatctccggcttgaaacaaatgtggctgcgcattatacggacttccggcggttattcctatcctgacaaggcatcgatggctataatccttccacctctccttttataaacaggaacgtctatgatccgcagtatgaccgcctacgcccggcgtgaaatcaagggtgaatgggggagcgcaacctgggaaatgcgcagcgtaaaccagcgttatctggaaacttactttcgtctgccggagcagttccgtagccttgaacctgtcgttcgcgagcgtattcgttctcgcctgacgcgcggtaaagtggaatgtaccctgcgctatgagccagatgttagcgcgcaaggtgagctgatcctcaacgaaaaactggctaaacagctggtaactgccgcgaactgggtaaaaatgcagagtgacgaaggggaaatcaacccggttgatattctacgctggccgggcgtgatggcagcccaggagcaggatcttgacgccattgccgctgaaattctcgcggcgctggatggtacgctggacgactttattgtcgcgcgcgaaaccgaaggtcaggcactgaaagcattgatcgagcagcgtctggaaggcgtcaccgccgaagtggtcaaagtccgctcccatatgccggaaatcctgcaatggcagcgtgagcgtctggtcgcgaagctggaagatgctcaggtgcaactggaaaacaaccgtctggagcaggaactggttctgctggcacaacgaattgacgttgccgaagaactggatcgcctcgaagcgcatgtcaaagagacctacaacattctgaagaaaaaagaagcggttggtcgtcgtctggattttatgatgcaggagttcaaccgcgagagcaacactcttgcgagcaagtctatcaatgccgaagtgacaaactccgccatcgagctgaaagtgttgattgagcagatgcgcgagcagattcagaacatcgaataactcgtaacgccaattcttacttttccgccttcacaaatgccgccactcaaacagagcggcatttttcttccccgcaacattcaattctgttttgcgtgcctgctccagattttgcgatgtttttttgcccagcacactgagaacgtgagatactcacaactgtatataaatacagttacagatttactttctttgcaattgatatcacatggagtgggcaatgaacgaacatcatcaaccttttgaagagataaaactgattaatgcaaacggagcagaacaatggagtgcaagacaacttgggaaactactgggttatagtgagtatcgtcactttatacctgtattaacgcgcgccaaagaagcctgtgagaacagtggtcacacaattgatgaccatttcgaggagatcctcgatatggtcaaaattggcagtaatgccaaaagagcattaaaagacatcgtactctcccgctatgcctgttacctggtagtacaaaacggcgaccctgcgaaaccggtcattgcggcagggcagacttattttgctatccagacccgacggcaggagcttgctgacgatgaagcatttaagcaacttcgtgaagacgaaaagcgtctgtttctgagaaatgagttgaaagaacataacaaacaattggttgaggcagcacagcaagctggggtagcgacagctactgatttcgccatatttcagaatcatggttaccaggggctgtatggtggattagatcagaaagctattcatcagcggaaggggctgaaaaagaatcagaagatcctggatcatatgggtagtacagaactggcggctaatctctttcgagctacccaaacagaagaaaaactcaagcgggatggcgtgaatagtaaacagcaagcaaacaccacacactttgacgtgggtcgcaaggtgaggcaaaccattcaggaacttggcggaaccatgcctgaggagttgccgaccccgcaggtcagcatcaagcagttggaaaacagtgtaaaaattacagagaagaaataacagaaactaaaaactctttttgttgattgagacacccgatgcgtaagccaaggtccaggtgcagtgaacacaatggctaaatattgcacctttcttttccccctcagttttaacctattttttcttatgcattttctcagacaagaagtcagaagaatgcatctctgctacagaaaatagcgatttcacataactacaagttatcaatttcccctccccttaaaaaatctcaatcgtgacaatgcgcacaaatcgctaccctgccagacagatttttagggagagaaccatgctgttacacattttgtatttggttggcattactgccgaagccatgacgggggcgctggcggccggacgacggcgcatggatacatttggcgtaattattattgcgaccgccaccgcaattggcggagggagtgtgcgcgatattctgctgggccactatccgctcggctgggtcaaacacccggaatatgtgattatcgtcgctaccgccgcagtactcaccactatcgttgctcctgtaatgccttacctgcgcaaagtgtttctggtgctcgatgcgctcggactggtggtcttttctatcatcggggcacaggttgcactggatatggggcacggcccaattattgccgttgtcgcggcggtaaccaccggcgtgtttggcggcgttttgcgcgatatgttctgtaaacgtatcccactggtattccagaaagagttgtatgccggtgtcagttttgcctccgccgtgctgtacatcgcgctgcaacactatgtttctaaccatgatgtggtaattatctccaccctggtattcggcttttttgcccgcttactggcgctacgccttaagctgggattaccggtcttttactacagccacgaaggacattaaggttcaaaacctgtgatctgctgggcagccagccaactgcccagcttcttgatttgcgcattttccttccattcaataacctgtctggcgcgtccgcttccagtccccggcagctgctgccagaactgctccgtgctaaataaaagttggctccaggaccgttcatcactggcattaagcgccgcccgggttagcggtattcccattgccatcacccagcgagtaaaaggctgcttacgagccagattaaactgatgccatagctgcgcacttttacttttcgcgatccccggcgtgttctgtaattgctctggcgttaataaaagccaggaaaagatatgttcaaagcgatgagtctgatgcagcgcgcgccaaccggcctcaccaatgccatccagcccaagaacctgttttgcccccagccagactaagcgactaatgaactgttcctgacaaacatcagaagcaaagtagcaggtcaagctgttaaagcggttttctggcggtgtcggttttgtacgttctgcaccgcgccacaccacatcatcaatgcgaggaataccctgaccggcaaggctgacgagaatctgatcaccaggcgcaatatcccactcctgccagcgcctgacggaaccaatattcacccgctggacttttttatcatccagcatgacaggtgcgagactcgcaaccacgcttattttaccgctcttacccaccgcaaactgaattgccttcacttcggcaacctgagctacaggttgatatttccaggccaccagccactctgcctggcccggtagccaatggcgggattctggctctttcgccgctcgtacaactacgccatcggtgacgaagggtaattccgctttccaccactcattgcgtacgcgcgcaacttcatcagcatttttcaccgcacgggtatacgtctgcgttagagtaaaacctgcggtagccagctcttttaaacgatcagacattaactgcggtccatccggccatgcccagacaaaaacgcccagagaattcagcgtgtcgctatcgtcctggcgcatcatcaagccagcaacttttgcgcgggcatttattccccccatttgttgttggatatgcccctcgcgctggagaaatatttccccctgaagcgtactgttggctaaaggcccgctaacggtttgcggcacagcggaaattaagctaactttctgcgtccagtcctcgcctttcaggccattaccgcgactgattgctttgttcagtttcccgtcccgataaaccagggttaccgcaacgccatcaacttttggctgcacccaaagatcgctacgttctcgcatccacagacttaatgcgtttttatccaccattttgcgtacacccgtatgggcaaccggatgcataaccgcaccatttaaaggcggcatcatcacgtcgcggggctcgctcccaaagcagcgttgccactgcgtaagacgggcgcttaactgatcgtaaacaccgtcttccacctcactttttccttccttccagtagtcatcgtcccactgttttatttgctgttgcaggcgggaaatttcttcctgtgctctggctgggctccaggccggacagaccgcccacacagaactttgccagcacaagatacctattaatatcgccatccatactttcatcatcacctccgctgtagatagtcaggcagatatacaacgtgatgaaagcaaagccgagtggcaaaaacggagtctgcgaggacgcttcctgaaaatcgtctttattgcagtgaatgacaggcaaatgcggaagcagctacgcaaaacgcaacaactttgcgcaaaaagtgtgagcaagggctacgtcacatggccgcgccgtgtataataagctcgtatgtaggctttatttcgctaatcacatacgaaagatactcatggctcaaggcacgctttatattgtttccgcccccagtggcgcgggtaaatccagcctgattcaggctttattaaaaacccaaccgttgtgtgacacccaggtttctgttagtcacaccacacgccaaccgcgtcctggtgaagtccacggtgaacattatttctttgttaatcatgatgaatttaaagaaatgattagcagagatgcgttcctcgaacacgcagaagtttttggtaattactatggcactagccgtgaggccattgagcaagtactggcgaccggtgtcgatgtttttctcgatatcgactggcagggcgcgcagcaaattcgccagaagatgccgcacgcgcggagtatctttattttaccgccgtccaaaattgaactggaccgccgtctacgcggtcgcggtcaggacagcgaagaggtcattgcaaagcgtatggcgcaagctgttgcagaaatgagccattacgccgaatatgattatctgattgtgaatgatgacttcgataccgcgttgaccgatttgaagaccattattcgcgccgaacgtctgcgcatgagccgccaaaagcagcgtcatgacgctttaatcagcaaattgttggcagactgaacctgatttcagtatcatgcccagtcatttcttcacctgtggagctttttaagtatggcacgcgtaactgttcaggacgctgtagagaaaattggtaaccgttttgacctggtactggtcgccgcgcgtcgcgctcgtcagatgcaggtaggcggaaaggatccgctggtaccggaagaaaacgataaaaccactgtaatcgcgctgcgcgaaatcgaagaaggtctgatcaacaaccagatcctcgacgttcgcgaacgccaggaacagcaagagcaggaagccgctgaattacaagccgttaccgctattgctgaaggtcgtcgttaatcacaaagcgggtcgcccttgtatctgtttgaaagcctgaatcaactgattcaaacctacctgccggaagaccaaatcaagcgtctgcggcaggcgtatctcgttgcacgtgatgctcacgaggggcaaacacgtagtagcggtgaaccctatatcacgcacccggtagcggttgcctgcattctggccgagatgaaactcgactatgaaacgctgatggcggcgctgctgcatgacgtgattgaagatactcccgccacctaccaggatatggaacagctttttggtaaaagcgtcgccgagctggtagagggggtgagcaaacttgataaactcaagttccgcgataagaaagaggcgcaggccgaaaactttcgcaagatgattatggcgatggtgcaggatatccgcgtcatcctcatcaaacttgccgaccgtacccacaacatgcgcacgctgggcagtcttcgcccggacaaacgtcgccgcatcgcccgtgaaactctcgaaatttatagcccgctggcgcaccgtttaggtatccaccacattaaaaccgaactcgaagagctgggttttgaggcgctgtatcccaaccgttatcgcgtaatcaaagaagtggtgaaagccgcgcgcggcaaccgtaaagagatgatccagaagattctttctgaaatcgaagggcgtttgcaggaagcgggaataccgtgccgcgtcagtggtcgcgagaagcatctttatagcatttactgcaaaatggtgctcaaagagcagcgttttcacagcatcatggacatctacgctttccgcgtgatcgtcaatgattctgacacctgttatcgcgtgctgggccagatgcacagcctgtacaagccgcgtccgggccgcgtgaaagactatatcgccattccaaaagcgaacggctatcagtctttgcacaccagcatgatcggcccgcacggtgtgccggttgaggtccagatccgtaccgaagatatggaccagatggcggagatgggtgttgccgcgcactgggcttataaagagcacggcgaaaccagtactaccgcacaaatccgcgcccagcgctggatgcaaagcctgctggagctgcaacagagcgccggtagtagctttgaatttatcgagagcgttaaatccgatctcttcccggatgagatttacgttttcacaccggaagggcgcattgtcgagctgcctgccggtgcaacgcccgtcgacttcgcttatgcagtgcataccgatatcggtcatgcctgcgtgggcgcacgcgttgaccgccagccttacccgctgagccagccgcttaccagcggtcaaaccgttgaaatcattaccgctccgggcgctcgcccgaatgccgcttggctgaactttgtcgttagcagcaaagcgcgcgccaaaattcgtcagttgctgaaaaacctcaagcgtgatgattctgtaagcctgggccgtcgtctgctcaaccatgctttgggtggtagccgtaagctgaatgaaatcccgcaggaaaatattcagcgcgagctggatcgcatgaagctggcaacgcttgacgatctgctggcagaaatcggacttggtaacgcaatgagcgtggtggtcgcgaaaaatctgcaacatggggacgcctccattccaccggcaacccaaagccacggacatctgcccattaaaggtgccgatggcgtgctgatcacctttgcgaaatgctgccgccctattcctggcgacccgattatcgcccacgtcagccccggtaaaggtctggtgatccaccatgaatcctgccgtaatatccgtggctaccagaaagagccagagaagtttatggctgtggaatgggataaagagacggcgcaggagttcatcaccgaaatcaaggtggagatgttcaatcatcagggtgcgctggcaaacctgacggcggcaattaacaccacgactagcaatattcaaagtttgaatacggaagagaaagatggtcgcgtctacagcgcctttattcgtctgaccgctcgtgaccgtgtgcatctggcgaatatcatgcgcaaaatccgcgtgatgccagacgtgattaaagtcacccgaaaccgaaattaatgttttatgaacccaacacgttatgcacgcatctgcgaaatgctcgccaggcggcagcctgatctgaccgtctgcatggagcaggtccacaaacctcataacgtttctgcgattattcgtaccgcagatgccgttggcgtacatgaagttcacgccgtctggcctggtagccgcatgcgcaccatggctagcgcagcggcgggtagtaacagctgggtacaggtgaaaacacaccgcaccattggcgatgccgtcgctcatctcaaaggccagggcatgcagattctggcaacccatctttctgataacgctgtcgatttccgcgaaattgattacactcgcccgacctgcattttgatgggacaggagaaaacgggcatcacgcaggaagcattggccctggcggatcaggacatcatcattccgatgatcggcatggtgcagagcctgaatgtttccgttgccagtgccctcattctttacgaagcccagcgtcagcggcaaaatgcaggcatgtacctgcgtgaaaacagcatgttgccggaagcagagcaacaacgcctgttgtttgaaggcggctatccggtgctggcgaaagtcgcaaaacgcaaaggcctgccttatccccacgtcaatcagcaaggcgagatcgaagctgatgccgactggtgggctactatgcaggctgcagggtaagtgccatgaaaggtcgcctgttagatgctgtcccactcagttccctaacgggcgttggcgcagcacttagtaacaaactggcgaaaatcaacctgcataccgtgcaggatctactcttacaccttcccctgcgctacgaagatcgcacccatctctaccccatcggagaactactgccgggcgtttatgccacggtggaaggcgaagtgctgaactgcaatatctccttcggcggtcggcggatgatgacctgccagatcagcgacggttccggcatcctcaccatgcgctttttcaatttcagcgcggcaatgaaaaatagcctggcggcgggccgccgtgtactggcttatggcgaagcaaagcgcggtaaatatggtgcggagatgatccacccggaataccgcgtgcagggcgatctcagcacgccagaattacaggaaacgctcacgccggtttatccaacaacggaaggcgtaaagcaggccacgctgcgtaaattaaccgaccaggcgctggatctgctcgacacctgcgccattgaagaactcctgccgccggaactgagtcaaggaatgatgacgctaccggaagcgttgcgcactttgcaccgcccgccaccgacgctacagcttagcgatctggaaaccgggcagcatccggcgcaacgtcgtctgattctggaagaactgctggcgcacaacctcagcatgttagccttacgtgccggagcacagcgttttcatgcccagccgctgagcgccaatgacacgctgaaaaataaactcctcgccgccttaccgttcaagccaacgggcgcacaggcacgcgtagtggcggagatcgagcgcgatatggcgctggatgtgccgatgatgcgtctggtgcagggcgatgtaggttccggtaaaacgctggtcgccgccctcgccgcgttgcgtgcgattgcccacggcaaacaggtagcattgatggcaccaaccgaattactcgccgagcagcacgccaataacttccgcaactggtttgcaccgctcggtatcgaagtgggctggctcgccggtaagcagaaaggtaaagcacggctggcacagcaggaagccatcgccagcggtcaggtgcagatgattgtcggtacacacgccatcttccaggaacaggtgcagtttaacggcctggcgctggtgattatcgacgaacagcatcgttttggcgtgcatcagcgtctggcattgtgggagaaaggccagcagcagggcttccatccgcatcagttgatcatgaccgccacgccgatcccccgcacgctggcaatgactgcgtatgccgatctcgataccagcgtgatagatgagctgccgccaggccgcacgccagtgactacggtcgctattcctgatacccgccgtaccgacatcattgaccgcgtgcaccacgcctgcataactgaaggtcgtcaggcatactgggtttgtacgttgattgaagagagcgaattgctggaagcgcaggcggcggaagctacctgggaagagttgaaactggcgctaccagagttgaacgttggcctggtacacgggcggatgaaacctgccgagaaacaggcggtgatggcgagctttaaacaaggtgagctacacctgctggttgccacaaccgttattgaagtcggcgttgatgtgcctaacgccagtctgatgattatcgaaaacccggagcgtctgggtctggcgcagttacaccagctgcgcgggcgcgtaggtcgtggcgcggtggcttctcactgcgtgctgctctacaaaacgccgctttctaaaacggcgcaaattcgcctgcaagtgctgcgcgacagtaacgacggttttgtgattgcgcaaaaagatctggagattcgcggccctggcgaattgttaggcacgcgtcagacgggtaatgctgaatttaaagtggcggatttactgcgcgatcaggcgatgatcccggaagttcagcgcctggcacgccatattcacgaacgttacccacaacaggcaaaagccctgatagaacgctggatgccggagacggaacgttacagcaatgcgtaaaaggcggcagtgagaagaccgccatttcaggttaccctaccttcctgccggatgcgattcatcaccctacaaattcaataaattatgaatcaatacgcaggcttgataagcgaagcgtatcaggcatttgtctttgttgcggcggcacttctaccgccgcttcatcggttaaccggcaaaaatcggcaacatcaaatacaacttaattaccagcgcattgacgatatcgataaagaacgcaccgaccatcggcaccaccaaaaacgccatgtggcccgggccaaagcgttcagtgatcgcctgcatgttggcgattgccgttggcgttgcaccgaggccaaaaccacagtgacccgcagccagcactgccgcatcgtagtttttgcccatcatgcgccaggtaacgaagatggcatacaacgccatgaagatggtctgtaccaccagaatcgccagcatcggcagcgccaggctagccagctcccacagtttcagccccatcaacgccatcgccaggaacaagctcaagcttacgttacccagcacggataccgcacgctcaaagacgcggtaaaagcccattatactcagaccgttgctcagaatcacgccaacaaacagtacacagacgaaggtcggcagttcaaaagcagtgccagccaaaagttgcgcaacaattttccccaccgtcaggcagatagcaatcagcgcgatagtttcaatcagcaccaagctggtgatcatgcgtcccacatccggcttttcaaacgccgtcgggacttcctggtcatccggaataccgttcggcgtggtggagtgtttcaccagatagcgcgccaccggaccgccaatcaagccgcccagcaccagaccgaacgttgcacaggccatcgccacttccgtcgcattggtgaagccataacgttcaatgaacaatttactccacgcagcgcccgtaccgtgaccgccggaaagagtaatagaaccggccaacagccccatcagcggatcaagccctaacaagctagccataccaatgccaatggcattttgcatcaccaacagaccaacaaccacaatcaagaagatgccaaccacacgcccaccggcacgcaaactggcaatgttggcgttcaggccaatggtggcgaagaaagccagcattaacggatcgcgcagggacatatcaaagttgacttcccagcccatgctttttttcagtactagtagcgccagcgccaccaacaaaccacccgcaacaggttccggtatggtgtatttcttcaaaaaggagacggaatggaccaacttacgcccgagcagcaacgtcagcgttgcggcaacaagcgttgctaaagtatcgagatgaaacatagttactcctttgtatccgcatcactctttcatactcgtcatacttcatcgcgcagtggcaacttcatgaactatgacgggtatcgagttatgctttcctgggtcaaattctcagctgttaatgaacaaatggcatggattttaagcagaaaaataccaaaagttatataaaaaagtgcatttatctcatttaaatatttagatgaggatgtggcaaacgtttgcttttctctttcggtcagctaaaatgcccgctttgctaccacgggattgttttcgatgtctgtttccaccctcgagagtgaaaatgcgcaaccggttgcgcagactcaaaacagcgaactgatttaccgtcttgaagatcgtccgccgcttcctcaaaccctgtttgccgcctgtcagcatctgctggcgatgttcgttgcggtgatcacgccagcgctattaatctgccaggcgctgggtttaccggcacaagacacgcaacacattattagtatgagcctgtttgcctccggtgtggcaagcattattcaaattaaggcctggggtccggttggctccgggctgttgtctattcagggcaccagcttcaactttgttgccccgctgattatgggcggtaccgcgctgaaaaccggtggtgctgatgttcctaccatgatggcggctttgttcggcacgttgatgctggcaagttgcaccgagatggtgatctcccgcgttctgcatctggcgcgccgcattattacgccgctggtttctggcgttgtggtgatgattatcggcctgagcctaattcaggttgggttaacgtccattggcggcggttacgcagccatgagcgataacaccttcggcgcaccgaaaaatctgctgctggcaggcgtggtcttagccttaattatcctgcttaaccgtcaacgtaacccttacttacgcgtggccagtctggtaattgcgatggcggccggatatgcgctggcgtggtttatgggcatgttgccagaaagcaacgaacctatgacgcaagaactgattatggtgccaacgccgctctattacggtcttggcattgaatggagtctgctgctgccgctgatgctggtctttatgatcactagcctggaaaccattggcgatatcacggcgacctctgacgtttccgaacagccagtgtccggtccgctgtacatgaaacgcctgaaaggcggcgtgctggcaaacggcctgaacagctttgttagcgcggtgtttaacaccttcccgaactcctgcttcgggcaaaacaacggagtgatccagttgactggtgttgccagccgctatgtcggttttgtcgtcgcgctgatgttgatcgtgctgggtctgttcccggcagtgagcggttttgtacaacacattccagaaccggttctgggcggcgcaacgcttgtaatgtttggcaccatcgccgcctccggtgtgcgtatcgtttctcgtgagccgctgaaccgtcgggcgattctgattatcgcgctgagcctggcggttggtctgggcgtgtctcagcagccgctgattttgcagtttgcccctgaatggctgaaaaacctgctctcctccgggatcgccgcgggcggtattactgccatcgtgctgaatctgattttcccaccagaaaaacagtaattcactggcggcggtaagataattaccgccgcagtctcacctctttaaccattcccgccttgaggattgcgcgtaaatcgtgcataactcccttatgtgcatttcacgggatggaagaccatgaaatttattgggaagctgcttctctacattctcatcgctctgttagtggcgatcgctggcctctattttcttctgcaaacccgctggggagcagaacatatcagcgcatgggtttccgagaatagcgactatcatctggccttcggggcgatggatcaccgtttttccgcgccatctcatatcgtgctggagaacgtcacgtttggtcgtgatggccagcccgcgaccctggtggccaaaagtgtcgacattgcgctaagcagtcggcaactgaccgaaccacgccatgtcgataccatcctgctggaaaacgggacgctgaatctcaccgaccagaccgcgccgctaccgttcaaagccgatcgtctgcaactgcgtgatatggcgtttaatagcccgaatagcgaatggaaactgagcgcgcagcgggtaaatggcggcgtagttccgtggagtccaaaagccggtaaagtgctgggtacgaaggcgcagattcagtttagtgccggaagccttagcctcaatgatgttcctgccaccaatgtactgattgaaggcagtattgataacgatcgcgttacgctgactaacctgggtgccgacatcgcccgcgggacattaaccggaaacgcgcagcgtaacgccgacggcagctggcaagtggaaaacctgcgcatggcggatatacgtctacaaagcgaaaaaagcctaaccgacttctttgcgccattacgctctgtcccgagcttgcagattggtcgcctggaagtgatcgatgctcgtttgcaaggtccggactgggcggtgaccgacctcgatctcagcttgcgcaacatgaccttcagtaaagatgactggcagacacaggaaggcaaactgagcatgaacgctagcgagttcatttatggtagcctgcatttatttgacccgattataaacacggaattttccccgcagggcgtagcgctgcgccagttcaccagccgctgggaagggggtatggtcagaacgagtgggaactggctgcgtgacgggaaaacgttgatccttgatgatgcggcaattgccgggctggaatataccttgccgaaaaactggcaacagttgtggatggaaacgacacccggttggttaaacagcctgcaactgaagagatttagcgccagccgcaatctgatcattgatatcgaccctgacttcccgtggcagctcaccgcgctcgatggttacggtgccaacctgacgctggttaccgatcataaatggggcgtctggagtggcagcgcgaatctgaatgccgccgccgcgacattcaatcgtgttgatgttcgtcgcccgagcctggcgctgaccgccaacagcagcacggtgaatatcagcgaactgagtgcatttactgaaaaaggcattctggaagccaccgccagtgttagtcaaacgccacaacgtcagacacatatcagcctgaatggacgcggtgtgccggtgaatattttgcaacagtggggatggcctgaattaccgttgactggcgacggcaatattcagcttaccgccagtggcgatattcaggccaatgtcccgttgaaacctacggttagcgggcaattgcatgccgtgaacgccgcaaagcagcaagtgactcaaaccatgaatgctggcatcgtttccagcggtgaagttacaagcacggagccggtgcggtaaacatcaatctcgccgggtacgactcagacgtacccggcattccatcaatagattacaacgtaattgtcagcgcattcccttgaggcttcaccaccagcccctgctcactttcagcctggctaccgtcttgcagaccatttactttcacaacattgcgcaggcacagtgtccagttcttcgcctcgcccgcaccagtcacagtaatcgtgttgccagtacgtgctgcttttaaagtaaagatcacgcttccgtcagcagcgggcacttcacagacggcttcatgcccgtcttgcagattgaagaggtggaatgccgtgccttcgtgccacacgtaatcgggacgttgatcgttgttgcccagcgccagtagagtgttatcacgcacataaacgggcagactcaggaagccgtgctgctgtttatgccagcgactaccgtcgagttcatcgttgtgccacaggtgtgtccagcgaccttccggcaggtagaactgcacatcgcccgcttcagtgaacaccggcgcaaccatcacgttgtcgcctaacatgtattgacggtcaaggtaatcacaagccggatcgtccgggaactccatcatcatggcccgcatcatcggcgtaccccgcgcgttcgcacgcgcagcttcacgatacagatacggcatcatgcggcatttcagttgcgtgaagaagcgcaccacatcacaggactcatcatcgtaggcccacggcacacgataagatttgctaccgtgtaaacggctatggctggagagcaaaccaaacgcgcaccagcgtttgtaaacgtgcgccggagcggtattttcaaagccgccgatatcgtggctccagaagccaaaaccactaaggccaatagacaaaccaccgcgcaggctttccgccatactttcgtagttagcgtaacaatcgccaccccagtgtaccgggaatttctgcgcaccgacggaggcgctgcgggcaaacaagacagcttcttcctcaccaacggtgtccttgagcacgttccacaccagttcgttgtagatgtacgcataatggttatgcattttctgcggatcggaaccgtcaaaccactgaacatcagttgggatacgttcgccaaagtcggtcttaaagcaatcaacgcccatcgcgaccagacctttcagtttgtcggcgtaccatttgcaggcatccggattggtaaagtcataaatcgccagacctggctgccatttatcccactgccataggctaccgtccgggcgtttgagtaaatagcctttctcttgtaactctttaaagacgggggatttttgaccgatataggggttaatccagacgcagattttcagtcctttcgctttcaggcggcggatcatcccttccgggtcagggaaagtcagcgggtcccactcaaaatcgcaccactggaaggctttcatccagaaacagtcaaagtggaaaacatgcagcggcagattgcgttccgccataccatcgataaagctgtttaccgtcgcttcgtcgtagttggtggtaaaactagtggttagccacaggccgaaggaccacgcgggcggcagcgccggacgaccagtaaagcgggtataacgatcaagtaccgctttcggcgtcgggccgtcgataacaaagtattcgagatattcactctcaacgctgaactgcactttggagactttctcgcttcccacttcaaaagagacacactggggatgattgaccagtaccccataaccacggttagtcatgtagaacgggatatttttatacgcctgttcagtacttgtgccgccgtcccggttccaggtctctaccgtctggccattgcgcaccagggcagtaaagcgctctcccagaccgtaaactgtttcgccaacgccaagatcaagccgctcaaacatataattgcgttgattattcgtgtcctgcacgtagccattatttttcacctgactaccggtaatacgttcgccgttgcgcagaaaatccagactccagaactcacctttgctgacacgcgcgcttaagttgccacttttaaactcagcataacgttctgtgttttcgattgtgaccttcacgtcctgcaaaatattgagcggataatgaggaccgttattcagcgccccctgaaaatgctcaatccgcacaccgacaataccttcctgtggggagaaaaagcgcaacgtaaataaaggcgtatcaagctgccaggtacgttcacgcacatcacggggggcagcatagaccaccatttcattatcctgctgttcaacctcgaacacctgaagcgggtgaatcaaattgaggccaggttgaatcaaccagtttccatcgctaattttcattgccgttccttagttctgcacttcttgagaggtgaattgttgctggcaacggcgtttaccctgagccagctgttccataacggttttcagattgtgcgtcgtgagactgtagtagcgtttagcgataatcgcgctcagcaaataacagatcgccggaacaatcgtgaatagcgcaataatgatgctaatcgtggcgctgttctgcgctttttctgccgcatcatatccgccataagccagcatccagccgataagagcgccgccgaaggccaaccccagtttgagcacaaacagcgtgccagcaaaactgatcccggtcaggcgtttaccattgcaccactcgccgtagtcgacggtatcggacatcattacccactggataggtgtcaccagttgatgcaacacaccaatcacgaagatgaagacaaacatagtgatgctggcctgcatgggaacaaagaacatcgcgaggctaatcactgccagcagggcgttcgtccaccagaagatagtgactttacatttccagtcggtcagaggttttgccagtgcggaaccaatcaggttacccacgcaataagtggtgagaaaagcgacaaacacttccggcgtgcccaaaatccatgtgacgtaatacatcatcgccccaccgcgtacgcacaccgccaggatattgaaaatggttagtaaaccgacaatccgccactggtcgttttgccagatatcacgtaaatcttcccgcatagacgttgttgtaggtggtgcttcaacgcgttctttagtggtgaagaaacaaaatgccagcatcatgaatgccaccacggaaaggaccgcgataccgccctggaaaccgagtggtttattatcaccgccaattaaattaaccagtggcatcatcagaacagtagaaagcatgcctcccgcggtcgccagcacaaaacgccaggattgcaggctgatacgctgagtcgggtcattggtgattacaccacccaatgcgcagtaagggatattgacgacggtataaagtaaggtaagtagggtgtaagtaattgctgcatagatcattttgccgttcatactgagatctggcgtgctataggccagtacacagacgatcccgaatggcagtgcgccaaacagtacccacggacgaaatttaccccagcgagagcgcgttcgatcggccaacaaccccatgcaaggatcggaaatcgcatccagtgcacgagcgaccaaaaacatggttccgacaaaaccggcaggaatgccaaaaatatcggtataaaagaacatcatatataacattacgttatcgaaaataatgtggctggcggcgtctcccatgccataaccaattttctctttaacggacaacacttcactcttcatctgcttttccttgatgctataggggtgctgagaccgataacgcattttgtaaaccatccctgtgagagcgaatattccgatatctggttattaatttatgattcttgttttatgtgatcgtggtagcgttaattccgctcatatatcattgtaaaatatgggttttatatgaactataatgctttcgtgataatacgctgcgtgtattaggcggaaaaaactgatctgggggatgtagaaactcaaggaagtagctataatgcgccccgcctccatgtagcaatcgaggcgcggaagatcgtcgtctccggtgaggcggctggacttcaaatccagttggggccgccagcggtcccgggcaggttcgactcctgtgatcttccgccaaaatgcctctcctgacgttctccaaccccttgtaatactgtcaatccagatattttctactgctcaatattcaatcggcttcaggaatacctggtctaaggttttgtgatggacgatgagcggctgaagaatccgcctgtcggttcttctgtcctcgaacgcatccgcgatattcacgccagtatgcgccgtgtttatttgcaggtgatttgcccccctgctgactctcagccaactgtatcgccattaaggtgaagatgttgttttactcgccccagaacacccttttttatacgactattctatttctttaaccgctggcgaaaaaaactgactataaacttcaccaataatcagactgccatcaagattaatttgttcatttaatatatcaaatcaacttgttttatttttactatcaaaaatagctcattgccttactataattaatatataaattcggtaattaattcttaacatgcttttactaataatctcaattgctggccctataatattgcgctagcattgctttctggttgtatcagcgatactcaaaaattcttaatacaatactcattcgactggtacttatttgtaactcagttatattttttcgcccggtgattcagaagaatgcaaaaaacggctaccactccaagtaaaatacttgatctcactgccgcggcatttttacttgtcgcctttctgacgggtattgcgggcgctcttcagactcctaccctaagtatattcctcgcagatgaactgaaagcccgtcctataatggtaggttttttcttcaccggtagcgctattatgggaattctggtcagtcaatttctggcaaggcactccgataaacaaggcgaccgtaaattactgattctgctatgttgcttatttggagtgctggcctgcacgctttttgcgtggaatcgcaactacttcattctcctcagtacgggcgtacttctgagtagttttgcttccaccgcaaacccgcaaatgttcgccctcgcccgtgaacacgccgacagaacaggccgtgagacggtcatgttcagtacatttttacgtgctcagatcagccttgcctgggttatcgggccaccgctcgcttatgaactggcaatgggatttagttttaaagtgatgtatctcaccgctgccatcgcatttgttgtttgcggactgatagtctggttgtttttgccaagtatacaaagaaatattcctgtcgttacccaacccgtagaaattttaccctccacccacaggaagcgggatacgcggctactttttgtggtctgtagtatgatgtgggcggcgaataatctctacatgataaatatgccgctatttattattgatgaactgcatctaaccgataaactgactggagaaatgattggtatcgctgccggtctggaaattccgatgatgttaatcgcaggctattacatgaaacgtattggcaagcgactattaatgctcattgctatcgtgagtggaatgtgtttttacgccagcgtactcatggcgacgactccggcggttgagctggaattgcaaattcttaatgccatcttccttggtattctctgtggtatcggcatgctttattttcaggacttgatgcctgaaaaaataggctctgcgacaacgttatatgcaaatactagtcgcgtcggctggattatcgccggctctgttgacggaattatggttgaaatctggagctaccatgcgttgttctggctggcgatagggatgttgggtattgcgatgatttgcctgctgtttattaaagatatttaactcaccagtctgggctaagaaaaatcggcgtggcgcaaacagagccatcctcgccatttttgctatcatgcctgcatacataaacgacaaaacagtatgcagagggaaaaatgggttccaccagaaaggggatgctgaacgttctgattgccgccgtgttgtggggaagtagtggggtctgcgcgcaatacatcatggagcaaagccagatgagcagccagtttttgactatgacgcgtttgatattcgccggtttgattctactgacgctgagttttgttcatggcgataaaatcttttctattattaacaatcataaagatgccattagcctgctgattttttccgtggttggcgcgctaactgtacagctcacttttttgctaaccatcgaaaaaagcaacgcagccacggcaacggtgctgcaattcctcagtccgacgattatcgtcgcctggttcagtctggtgcgtaaaagccgcccgggcattctggttttctgcgctattttgacaagcctggtcgggacttttttattggtgacacacggtaatccgacgagtttaagcatctctcctgccgcgttgttctggggcattgccagcgcatttgctgctgcattctataccacctatcccagtacgctaattgcccgctatggcacgttaccagtcgtcggctggagtatgctgattggcggtctgattctgttgcctttttatgccagacaaggaacaaactttgtcgttaacggcagtttgattctggcgtttttttatttggtggtcattggtacgtccctgacatttagtctgtacctgaaaggagcacaattaattggcggtccaaaagccagcattttgagctgtgcagaaccattaagtagcgcgctactctctttgctgttgctggggatcacgttcacattaccggactggctgggaacgctgctgattctgagtagcgtgattttgattagtatggattcccgtcgccgcgccagaaaaataaatcgtccggcgcggcataagtgagaattaccagccaggcaccgcgccaccgttaaaaatggtttctgccgctttagcgacttcgggactttgataagattgcagaaattccttcacgttttctgcattcttattatcttcccgtgccaccaaaatattcacatacgggctattcttatcttcaataaatacgctgtcgtgcaccggagaaagcccggtctgctgaatgtaagtggtgctgataatcgctacatcaactttgggatcatccagtacgcgcgggagctgcgccccctcgagttccataatctgcaaatgacgaggattatcggttatatccagcgcggtaggtaataacccttttccctctttcagagtaattagcttctctttttgcaacagtaaaagtgcgcgaccaaggttggtcgggtcgttggggatcgccactgtcgcgccttcttttatttgcgccacggttttgatttttttggaataacccgccatagggaagacaaacgtatttcccaccgctaccagtttataaccatgcgcctgattatcttgttcaagaaagggtcgatgctggaagacattcgcatcaagttcgccatgatttgtcgcatcgttcggtagcaagctaccgctaaatcctaccagttcaacatcgaggccatatttctcttttgccacctttttagcgacttccgcgacatcttgttctgcgccatttataacgccaactttaatgtgttttgcatcgctgctactctggtcgcaacctgccagcagaattccggccagcaataatgcggcccctgtccgtagatgatgtgttgtcagtttcatttttttatccttttattaatgattacctgactatagcggtaaggtcgctgcggtttaaaaaacgaaacgctatcgataagaataaaaaggaataaaagtggaatataaagtctggcacttcttactgaccacgcaagcgcgtttcgtacagcatgatgagagcgatgaaagcaaactacacttatgcttcattcgatacacatttgtaaaaggttgaatccatgaaaccaacgacactactgcttattttcacttttttcgctatgccaggcatcgtatacgccgagagcccttttagcagtctgcagtccgcaaaagagaaaaccacggtattacaagatttacgtaaaatttgcacgccacaggcgagtttaagtgatgaagcgtgggaaaagttaatgttgagtgatgaaaacaataaacaacatatacgcgaggccatcgtggcgatggaacgtaataatcagagcaattattgggaagcgttgggtaaggtagaatgcccggatatgtaagaacagcaacaactactgaccaacgcttctttacctgatatcaggatttcttcattttcacctttgcagtaaccaacaatgcagtcagcaacatcaatgtgccggacaacatcaacgggctagtcagaccaatattatccagcgcataaccgccgattgccgcgccacaggtattagcaagctgaataaccgccacctgaatagacccggctttttctgcctgatcggccaggctgcgggtgatccacgtactccagccgacgggaaccaatgcaaaagttagcccccagataatcgccacgccggtagcaacgattttatcgcttccccacaacgtcagtaccaacgcactcacagccagtattaacggcgcgcctgctaaggccagttttacgctacgtttaagaatgaagctgctaaggctcgtaccaataaagctggcgataccaaaactcaacagcaccagcgttaagccatccacgccgaatcccgccaggttcatatacaccgggcgaatatacgtgaagaaagcaaactgcccggcgaaagacatgaagatggcgatcatccctgccatcacacccggacgttgtaataagcggaaagtattttgtttctgatggctgggttcgcctggcagactaggcaaacttttgataatccagaaaatacacagcacgcccatcaccgccgccgcattaaagacattgcgccaaccgataagctcgcctaaaaaactgcccaacggcgcggcaatcaccagcgcaatagaaaccgcgccgaagatcacgctcagcgccttcggcaccgtacgcggcggcaccagacgcatggtcaggctcgcgctcatcgcccagaacccgcccagcgccagccccagacaggcacgaccgattaaaagcaaactgaaactgttagcaaaggaaaccagcaagcaggagagcgtcagcaaaacggcaaacaaaataacaacgtagcggcggtcagtagcctgaattgtctgggtaataaacaaactggcaaacattgccacaaaggcggtcacggtcacgctttgcccggcaaccccttcgctaatgcctaaatcctgggccattggcgtcaacaaactgacgggcaaaaactcaacgataatcagacaggcgacacaaaacgccacgctgaaaacggcactccagttcggtcgggtgatggcatccgcgccgcggttttcggcaataaattcactcatggtgttacccgtggcatgtttcaggggaaaagcgctccactttaacatactaatgtgactcgcatttaacgtttttgcaacttttacggtgttgctactgctggagttaagatcgaaacggaacagggcaaagattaccggatgcggcgtgaacgtcttatccacccgacaggtcaggcgcggtctgtaggctgataagacgaaacggtttcaatgcaaccagtgaacgccctcggcaggctgaaagaacgcgttatagcgcatctgaaaagcattaatatcctgcatttcaggttcggtttcgcgcagaaaacctagcgccagcctgacctgagcgtcggtaatcggcgcggcgaggcgagctttttgtaaaatccgatgccattgcagcaggttctgttcgctaccatcgacaatgacaatttgccagatgagcaacacctgcgcggcgttttgcaggtggctctcatccggacgatgcaaataacgtaaaaattcgtcaccagcactctttcccatttgatcgaccatgctctccacgggtacgacatcgatgttcagccgatcgctgagacggcgaatcgcttttctggccccggatgtcagcacccgaaaaccaaccacaaacactaccgccagcgtggcgagcattatccagatcatgagttctcctgcgtaatcagaactcatgatatctggaaaccctcgccagttattaatccaccagaataatcttcagtgcaaacagagctgcgaccaccaccacacacaggttcagatcgcgccagcgcccggtgcatactttcatgatgcagtagctcataaagccgagtgcaatcccttcggtgatgctgaaagtaaagggcatcatcaccgtggtaataaacgcaggcacgctttcggtaaaatcatcccagttaacgcgcgccaggctgctagtcatcagcacgccaacaaagattaacgctccggcggttgcgtaaggaggaactatcgccaccagcggactgaagaacataaccaacaggaacataacgccaaccacaaccgcagtcagccccgtgcggccaccgactgccacaccagaagtactttcaatataggcagtaacagagctggtgccgataaacgcacccgccacgctactgacgctatcaacatacagcgccttattcatattggggaatttaccgttaccatctattaagcccgctttatcagttacaccaattaatgttccactactatcaaataggttgatcagcataaaggagaaaatgataccggcgagttcaagtgttaacgcgccgctcaaatctacttcaccaatgacgccgctaatatcaggcggaatggaatagacgccgctaaaatgaacatcaccgaaaaataatccacagcaagacgtcaccacaatagaaaccagcaccgcggcatgaaaatgacgactactcaacacggttataataaaaaaccctaaaatacctaacaacacgccgtgagaacttaaatcgccaatcatcaccagcgtgtctttattggcgacaataacgccagtattttttaatcccattaaggcgataaataatccaattccgctggtgataccaatacgtaaacttaagggaatgttggagatcatccagtaccggatacgaaacagcgtgagcaaaaatagtccaactgcgccccagaatattgcgcccatcccggtctgccaggagatgcccatcgcccccacgaccacgaaggcaaagaaggcgttcagccccattgccggagccagcgccacgggtaagttagcaaatatccccatcgcaatactgccgataccggcaatcaaacaggtggtaacaaacaccactttcgggtccatttgtgccgcgccgaggatttgcgggttcacaaaaacgatgtacaccatggttaaaaaagtggtcatccccgcaatcaattctgtgcggacggtggtcccatgctgaggtagtttaaataatcggctaagcgtcccactttcattactcacgtaatcggtattgtcattattcatttttttgtccattggaggagatttaatcccttgcttttgtaaaacaaatgacaacaacggttcagtgataattatcacatttcaattgcacattaatggatattctttaataatctcgcgacgtttctttatgataaataataatcaaattgataaaatcaaaatgagaaaaatatgaataattctattaaccataaatttcatcacattagccgggctgaataccaggaattgttagccgtttcccgtggcgacgctgttgccgattatattattgataatgtctctattctcgacctgatcaatggcggagaaatttccggcccaattgtgattaaaggacgttacattgccggtgttggcgcagaatacactgatgctccggctttgcagcggattgatgctcgcggcgcaacggcggtgccagggtttattgatgctcacctgcatattgaatccagcatgatgacgccggtcacttttgaaaccgctaccctgccgcgcggcctgacgaccgttatttgcgaccctcatgaaatcgtcaacgtgatgggcgaagccggattcgcctggtttgcccgctgtgccgaacaggcaaggcaaaaccagtacttacaggtcagctcttgcgtacccgccctggaaggctgcgatgttaacggtgccagttttacccttgaacagatgctcgcctggcgggaccatccgcaggttaccggccttgcagaaatgatggactaccctggcgtaattagcgggcagaatgcgctgctcgataaactggatgcatttcgccacctgacgctggacggtcactgcccgggtttgggtggtaaagaacttaacgcctatattactgcgggtattgaaaactgccacgaaagttatcagctggaagaaggacgccggaaattacaactcggcatgagcttgatgatccgcgaagggtccgctgcccgcaatctcaacgcgctggcaccgttgatcaacgaatttaacagcccgcaatgcatgctctgtaccgatgaccgtaacccgtgggagatcgcccatgaaggacacatcgatgccttaattcgccgcctgatcgaacaacacaatgtgccgctgcatgtggcatatcgcgtcgccagctggagcacggcgcgccactttggtctgaatcacctcggcttactggcacccggcaagcaggccgatatcgtcctgttgagcgatgcgcgtaaggtcacggtgcagcaggtactggtgaaaggcgagccgattgatgcgcaaaccttacaggcggaagagagcgcgagactggcacaatccgctccgccatatggcaacaccattgcccgccagccagtttccgccagcgactttgccctgcaatttacgcccggaaaacgctatcgggtcattgacgtcatccataacgaattgattacgcactcccactccagcgtctacagcgaaaatggttttgatcgcgatgatgtgagctttattgccgtacttgagcgttacgggcaacggctggctccggcttgtggtttgcttggcggctttggactgaatgaaggtgcgctggctgcgacggtcagccatgacagccataatattgtggtgatcggtcgcagtgccgaagagatggcgctggcggtcaatcaggtgattcaggatggcggcgggctgtgcgtggtacgtaacggccaggtacaaagtcatctgccgttacccattgccgggctgatgagcaccgacacggcgcagagcctggcggaacaaattgacgccttgaaagccgccgcccgtgaatgcggtccgttacccgatgagccgtttattcagatggcgtttctttctctgccagtgatccccgcgctaaaactaaccagtcaggggctatttgatggcgagaagtttgccttcactacgctggaagtcacggaataataaaaaaagcccggcgtcatgccgggcaaaagtcaccagttacgtttatgccactgtcaactgctgaatttttttctcgcggcggattttgcgttcttccattaccgccactatcgccatcaggcagatacaaccaatcgcggcgatatccagcgcggcgaaggtgcctgcccagccggtaaggccgaataccggcgtcccatcggcaatcattcccagacctaacttggcaaagctgtcaccaatcaggtaagcaaaggtgcctttaataccatcggcagcgccaatcgcttttttaggtacaaagccaacagcagccacaccaatcaacaattgcgggccaaagaccaggaaacccaacgcaaagagagaagccagatagatatattcgttactggcatgttgatacacaccgagcgtggcgataatcagcgccagcgcgatgcaggccaccaggccacggcgaccgttcgccaggtcagagagccagccccacagcagcgtaccgaccagcgcaccagcttcaaacagcgtaaagccctgaatcgccaccgctttagagagtttcagttcctggaacgcgtatacggtactccactggtcgataccaatacgtaccacatagaggaaaatgttggcgaagcacagcagccagatcactttgtttttcagcacatactcaacaaagatctgccacttggtcatatcggtagattctgtctctttgtcctcttcgctgatctcctcgccgaacagttcttcagctttgccgaggccataagattccggggagtcgctgccgtaacgcaggccgataaaaccgacaatcagcgcgataatgctcgggaagataaacatgccgatgacatggccatcgaacaggtaatttgccccgaacagcgccacacctgctgcgcctgcaccgccaaggttgtgagaaatattccagaaaccgaggaatgtcccgcgtttacgacgcggcgtccatttggtgatggtggagtaactgcagctaccgccggtactctggaaaaagccgcttaaggcgtagaaggcaatcatcaggaacaggctaacgctgccgctgcccatactggcactgaagcccagcatacaaatagcagagaggatcagcatgaacggcaggaattgtttggtgtttttgccgtcggcgtagtaggaaaccagcgttttacccacgccataagtgatggagaaacccaggccgatcatccccagctgcgtcatgctcaacccgtaggtgctaatcatatcgttctgcgcgatgttaaagttcttgcgaatcaggtacatcgtcaggtagccgataaagaccaccaggtaggattgcatgaacggtttgaaccacattttgcgccgcacttcgagcggaaggtccagggtcggcttgcgaacctggtttaagaaagccagcatgggttactcctgaaatgaatacctgcgtgaggcatgcattgtaaaaatcagcagcaaatcaggcctgagatagcgtccaggcaaaacctggaaaatttcttagttttgccggatatgaagtgaaaaggtgagatgcatcacgcttcgcgcggtgtctgggcgttcaaaaagggcagtaacagcagtgcggaaatcccggcggcgatagagataaccacaaaaaatccgctccagtgccaggtatcgagtactttcgccagcggccaaccagcaaggctcgcccccagataagcaaacaagccgacaaaccccgtcgccgcccctgccgcctctttgtgggaacactctgccgccgccataccgattaacatctgtgggccaaagacaaaaaaaccaatggtgaagaagcaggttgcctgcatcacgtagctggcaaatggcatcagccacagggagccgacactaagcaaaattccggcggcgaaaatcaaattcatcggccctcggttgccgttaaacaatttgtcgctgccccaaccggctaccagcgcaccgataaatccgcccagttcaaacatcgtcactgccgtattcgccgtgaccagatcgacgcccagtgtctcggacatatacaaattgccccagtcgttgatcgccgcccggaccacatagaccagcacatagcaaaagctaagcagccagatatacggattcagcaacacatatttggtgaggatctctttacgcgtcaaccctgccccttcttgttgttgagcaatttccagcgcgtcgtgtcgccattcaccgaccgccggtaaacctaacgcctgcgggcgatcgcgtagccgccagcagagaaaaatccccacgactatcgccatacaaccagcaatcatcatcccggcacgccagccgtaatgcagcgcagccgctgccatcacaatgggaatgagtgcgccgccgacgttatgcgccgtgttccataatgcccaccaaccgccgcgctcggtacgactataccaggccgttaacagacgcgcacacaccggactaccccagccctggaaaaaggcgttcagcacccagagcacggcaaacgcccataggctcgtgctgaagccaaacagaatgttgataatgcccgtggcgataagccctatccccataaaataacgggcattactgcgatcgctgacaatgccggagacaaacttgctcacgccataggtaatgtaaaacagggtcgctaacaggccgatatcgctacggctgagcacgccgttagcaaggatttctggtacggcggcgttaaaacttttccgcgtgaagtaaaacagcgcgtaacccagccagatggtcagcagaatatgccgacgccagtagcgatagcgggcatcaatttcatatttatcagtcattaatggcgcatcggcaggcgctttcagaaacggcaacatcatcaaaccttagacatagcgttgaggtagagaaacgctgacacgcgtgccgtgcagacaggaaatgtgtaatgtgccacccagcgccgttacgcgctcgcgcattccggtgaggccaaaaccttgttgcccggaacccggcggcaaaccgctgccatcgtcttcaataaccagcatcaaccgttcatcctgctgccagccttgcagggtgaccgcgctggcatcagcatgtttcacaatgttgttcagcccttcctggcagacacgaaacagcgtcacgcgctggttttcgcttaacgcactttcatcgattcgccattcgagatggctgacaataccgcgcccttccagctccatttcccgcatcagactgcggatggcctgctccagggtgagatcatccaactggcgcggacgtaaccgacccaacaaacggcgcaccgcgtcgtaaacgcccaggcttagttgttcgatgagctgcccgctctgcttcacgctggcgttatctgccgccagccgctgaacaatgcccgcctgagtacgaatagcagtgatggtctgaccgatatcatcatgcagctcacgcgccacatcacggcgcacgctctcttcggtttccagcaaccgttcagccagatgctgattgcgcgccagttccttttgcaggctctggttaagttcacgcaaccgctggatgccagcgccaagcaacaaccctgtcagactttgcaccagcaggctgagcaataaatccaccggatgatcgcgccaggtttgactggcgatcagcgcgatggcgttcatcaacgtcgcaatcagcgccccttgccaaccatagtgccaggccagcgcgataatcggcagcgccagacagaatggcgtaaagcggctcagttcgtccggcaatcccaactggagccagagactgataacaaacagcagcaagtaccagaccagatgtcgcccgcgccagttgattggctgagaaaccagactcggaccgagcggcagccaggtgttattggcgagatagtgccagaacaccagacatatcggggccagcgtcaggccgccagttaaagtcagcaacagcgcattccagctctctttgccgtgccaaagccagggcaggctctgcaacaacgccgccgccgttaacgccgccccctgtaacagcaaggtgcgccagtcacgctgatggcgatagcggctgatcagcgctacgggcagtaacgtcagtaaactaccgatcatcaataacggaaaatgggttaaaccgaccgcctgcgttagccagtaaatcagcagccactccgcgcccagcaatacgggccagtatccgcgcgggcattgcagcattagccccagacgcagaccaaacggaaataacagcaccgccatatcagggcgctcaaccagatgcaggctgatactccacaggcaaaaccatgcggcagagaagataaaaaagcaggcaataacggtaattaagcgggagaacaacgtcttcatcaccagccatcaaacatgcggcgcgccagctctacgtcgttactgacgcccagtttttccatcagattggcgcgatggacgtgtaccgttttcggactcaagcccagttcggcggcaatctctttcaccgccattccttgcgccagtttttccgccacctggcgttcacgtttggttagcgggtcctgacgaccggatgccagtttaatggcaatatccggcgtcagataacagccgcccgtggcaaccgtatgcaccgcagcaatgagttcatccgggctacagcgtttggaaagaaagccgcgtgcccccgcgttaagcgcctgctcaaccagcgcaggactgtcgtgaacggagagcataatcgtcgccatacctttcggcagctggcttagcagctccagaccggagatatcgggcatggagatatcgcaaatacacacctgcacaccgcgccccggcagccccgccagcgcctcgcgcccgctaccaaactcggcaactacctgcaaatcaggttccagccccagcagctgcgcaaagccggagcggacgatgaggtgatcgtctataagggcaacggtgatcatggtcttgtcctggcgggtaaaaaaaatacgcgcttaccttaacgataagcgcgatgttgttcaagccttgagcggttactgaaaaaacaccgcgatcttgttaaacatcgtcggatcggactgattacgctgcactttcacgacatcttccagcttatcgatttggcttatcatctgctccagacgctggtcgtcattgaccagtagccagatatggcttttgtcgctgtcctgaatcggcagacaaagaatgccttcaacgttaaaagcgcggcgggcaaaaaggccacaaacgtgggtcattacgcccggatggttgcgaacggtgagctccagaattacgttgtcatgagttgtgttttgcatggcttattcccccaccatttcagtattcgccgcacctggcggcaccatcgggtaaactttttcttcggcatcaatgcgcacatggatcagcgccgggccagggcgattgatgatttcctgcaaactagcctgcggatcggcttcgttattcaaatcacaggtttcgaggccgaatccggcggcaatctgcataaagttgattttgcccggataggtggcggcaaaaacgccttgctcgtagaacagactctgttgctgatgcaccagccccagcgcttcgttgttcatcagaatgattttgacatccagctgattttcactggcggtcgccatctcctgaatattcatcatcaggctgccgtcgccggagaaacacaacactttgcgatccgggttcgccagcgcagcgccaatcgccgcaggcaggccaaaacccatcgtgcccagcccaccggaggtcagccactggcgtgggcgattgagcggataagcttgcgcggtccacatctgatgctgaccaacgtcggtggtgataattgcattgtcatcgacacaggcggcaacggcgttgatcaggccgtaatggcttaacggatcgcacgctttcgggattggacacggaaactcacgctgcaaatccgctaccaactggtgccactctgcacgcggttgcgcttccaccagcgggatcaactgcgccagcacgtcatcaacatccgcctgaatcgccacgtgcggctgcttgattttacccagctctgcacggtcgatatcgacatgaatgattttggcattcggacagaactgctcggttttgccaatcgcccggtcatcaaaacgcgcaccgagcactatcaacaaatccgcctcctgcaaaatatagttggtgctgcgcacgccgtgcatccccagcatacccaggctcaacggatgcgcttttggcaacatgcccagcgccattaaagtcatggtggtaggcagttgcgctttctccgccagttcacgcacccgtgcgggcgcattgatcacaccgccgcccagataaagcaccgggcgtttggcagcgttaatcatcgccgctgcgtcacgaatgctttcttcgctaaaggcgggggcggcggctttttctgccatagcgggctgtgtttcaatctcaaaaactgccgtttgcacatccttaggaatgtctatccacaccgggcctgggcggccactttgcgcaatgcggaaggcatcgctcatgacctgcgggagttcttcgatatgtctgaccagatagttgtgtttggtgatggggatagagatgccgtaggtgtccacttcctggaaggcgtcggtgccgatcatgctggcgggaacctgaccagtgatgcaaatcagcgggatggagtccagccgcgcatcggcaatggcggtcaccaggttagtcgcacccggtccgctacaggccatacagaccgccggtttaccgtcggtgcgcgccattccctgagcgataaagcccgcgccctgttcatgacgggccagaatatggcggatttgcgtgctttggcttaaggcatcgtaaacaggcaggatagaaccgcccggaatgcctgtcacaatcttaatgccctgctgttccaggaaatgaacgataaattctgcgccggtaaagcgcttacgcgtgcttgttgtgccgctacttgccatgctccagtccttttcttctgggccgactttccgggaggtgcttaaacgaaaaaccccgcccggtttgcgccggcggggttttggaatcgtgtgttgttccagtccttacggcgcattgccgacgaccaccaccacacgcacgacgaccactgcggcggatggcgcagttggtagtagttttgcgttgagcatggaagtagtcattggggaccttgttggttttgtgtttaacaatatttatacaagcacagctttacaggggagacaatggaaaatttttcagcaagggaaaattgaggggttgatcacgttttgtactgaattgcagataacaaaaaaccccgccggagcgaggtttcgtcagtcgcctgcggctggtaaccgcaaagcacactgtattatgtcaacactgaaagtatacgtgttccgcgcagaacgcgcaatttcggcacgaattttgacgtatttagtgcatagttgagtatcgatcacagtttgcgttttgtccaaatattactgtttatttatacagtaaacttctataatatcactgtacgcaatgtgttatgcgggggccgcatcgttacccggcgcactaagtcctggctgaaacgggtggtgccgtcagcgccttaaccccgcgtgagcacactgtgttatgtcaacaagcacaacgtttctccttgagataccgcgtgcacaacagctggcaacaggcagcggaaaggtacgtcagctggcagtgctcctgaaccacaggagacgcgtatgaacctggtggatatcgccattcttatcctcaaactcattgttgcagcactgcaactgcttgatgctgttctgaaatacctgaagtaattcagattcaagtcgcaccaaaggggagcgggaaaccgctccccttttatatttagcgtgcgggttggtgtcggatgcgatgctgacgcatcttatccgccctaccatctctcccggcaacatttattgccgcttttgtttacatattctgccgctaaacaattccccattcctggcgtatatctggctaacattcatcaatgtgatagattcctctcccgcatttatgggaatgcgtagtgacttattctaattatttttataaaagcatccgtgataatgaaaaggcaaagaaacgtcaatttgttattgatgttggtattactcgtggccgtcggtcagatggcgcaaaccatttatattccagctattgccgatatggcgcgcgatctcaacgtccgtgaaggggcggtgcagagcgtaatgggcgcttatctgctgacttacggtgtcagtcagctgttttatggcccgatttccgaccgcgtgggccgccgaccggtgatcctcgtcggaatgtccatttttatgctggcaacgctggtcgcggtcacgacctccagtttgacggtgttgattgccgccagcgcgatgcaggggatgggcaccggcgttggcggcgtaatggcgcgtactttaccgcgagatttatatgaacggacacagttgcgccatgctaacagcctgttaaacatggggattctcgtcagtccgttgctcgcaccgctaatcggcggtctgctggatacgatgtggaactggcgcgcctgttatctctttttgttggttctttgtgctggtgtgaccttcagtatggcccgctggatgccggaaacgcgtccggtcgatgcaccgcgcacgcgcctgcttaccagttataaaacgcttttcggtaacagcggttttaactgttatttgctgatgctgattggcggtctggccgggattgccgcctttgaagcctgctccggcgtgctgatgggcgcggtgttagggctgagcagtatgacggtcagtattttgtttattctgccgattccggcagcgttttttggcgcatggtttgccggacgtcccaataaacgcttctccacgttaatgtggcagagcgttatctgctgcctgctggctggcttgctgatgtggatccccgactggtttggcgtgatgaatgtctggacgctgctcgttcccgccgcgctgttctttttcggtgccgggatgctgtttccgctggcgaccagcggcgcgatggagccgttccccttcctggcgggcacggctggcgcgctggtcggcggtctgcaaaacattggttccggcgtgctggcgagcctctctgcgatgttgccgcaaaccggtcagggcagcctggggttgttgatgaccttaatgggattgttgatcgtgctgtgctggctgccgctggcgacgcggatgagccatcaggggcagcccgtttaagcgcacgtcaccgcagcatcgtcatcagctccatgggagaacgatgctgctttatcagatcacgcatcacccgcatatgcggtgcggagtaagaataaaacgcctgatagcccgcacaaagcacgctgtctggcgtctcctgccgagcgtgcgggcacaggcgatgccagtcgcacgcctggcagtcacagcgcggttgcgggttttcgctgccacaccatttttgtaaggtggcgtcaaaaagctcaatgctgatacgactgatatctgcccgcacccaacactcgaacagggcaattaaaaatttcccccacagctctgctgtcacgctagcggccgtcagatcgccccggtcatcaaattcaagatagggaatgagctgtacggagcggatgccccgctgtttgaaattgtgataaaaatcggcaggttgcagagcatccttgtactctacaaccagtttatgcctgtcctcttcagcatcaatgacctgacttcctgtcatgcgactctctcaataaatacgataagttgatgtatatgcgttacagcaaacagtattgcgagagataacaccgcgagggagatcaaaaatttgtcacggactacgtgaaattgggaaaaatcgctattcgtgacatccattaaattgcgattacgggtgtagtgccagaggatcagcgccacgatggcgagaatgccaatgctaatccagaataacatgcccgcctggtgccagttgtgtttgatagccaacgccatcaacgcgccgtagcccagcatggtacgaaaccacgccagacttgtgcgctccggctgcagtcctgggtcggcaatgcgtctggctttgcggctatccggcatacaacaccagtcccataacgttaattatccggcatacaacaccagtcccataacgatcaccgccacgaccatcaatattaagctaatgattaataagctgttggtgtagggcaggtcctctttcagacgcatcgctttttcattgcgtaaccagcgcaagtagccatacatcgctaacccgccggaaaacagacacaacaacaacgccagcagttcgcgaatgacgggcgtggcgaaatctggcgcaagttgatcaagcccaacccccgccgccagaaatcctagtgcagtacggatccacgccagaaaagtacgctcattagccaggctgaagcggtaatcaggcgcttctccgaggcgggaaattttcattgttgctcctttgcaatttcactaacgctctacctttagcggtttttttaagaatttcgtccgcccgtttcctgatatgcttttgccatccgctacaaggaggtcagatgggtatcatagctcaaaataaaatcagtagtttgggcatgctgttcggtgccatcgctttaatgatggggattatccactttagtttcggccctttctccgcaccaccgccaacgtttgaaagcatcgtggcggacaaaacggctgaaattaaaagaggtcttctcgccggaataaaaggcgaaaaaattaccaccgtggagaaaaaagaggacgtagatgtcgataaaatcctcaatcaaagcggtatcgcactggccattgctgcgctactttgcgcatttattggcggtatgcgtaaggaaaatcgctggggcattcgcggcgcgctggtttttggcggcgggacgctggctttccataccttgctttttggtatcggcatcgtgtgcagcattttgctgatattccttatcttttccttcctgaccggcggtagtctggtttaagcagcctgaataatgcccgccgggtgatcatcagcgggcattatcgtcagaacttctgttttttctcctccaccttcaccccttgtgtcggtaggccggtgtcatagtcgcgtacaactgggctatagccatcttgtggacgtggacgaaacgcccccatccagcgcggccgtgcatctttacgccacggacgcagactccattggtaactgcggaacggatcgcgaattttgtccatgtaatccaataaggcgtcatgcattttgctgcgaacgtctgcaaaacggatatcatcgatcaggttatgcatttcatttgggtcattacggcgatcgtaaagttcatcactggtgaagaggttgagtaccagtttaaagtcatccgtcacccagcaacgcaccggaataaaaccgccaaagctgtcatgctcaatctcgtagcggttaaattccaccatcacgccgcgtggctctttcacggcaaggatattttcccccggcagaatctctggtttttcaatatctgccagcgccatcattgtcggcagtaaatcgatatgactgactggcgtatcgacctgtcgccgctccccttgcgggctacggatgatcagcggaatgcgggtgatgtcgtcatacatcgccgcccctttactgatcagcttatgtgcgcccatcatttcgccgtgatcggaggtataaataacccacgtattttcacgttgctctggcgttaaggcattgatgacccgtccgatttggtcatcaacaaagtcattacaggcaaaatagagcggatggtgataaagcccgtcatcaccgactgggcttggcatcgcctgcgcccataagcggtgatgttccggtttgttagccaggtcatcctgtgctttctcgcccagctcgtagtaaaaatcagcgtatttctctaaatactccaccggacaggtgaacgggtgatgcggctcatcatagctaaccaccatcaggaaaggctcgtctgcgcgcgcaggctgttgcagaaaatccaccgcccgattgctgatacgatgcgcccaggtgaaggtttcgtcgatatggttcgcctgtaaatcttcgacgctgtttaggccattgcgccacaggctaatctctttttccgtcagttcgctaagatagttcgccccatcgaaccagtaatcagcgtcccactccggcggacactcgccagtgccgaaatagtcatgaccgtcgagatgccatttgccgatgtaacaggtgtgatagccggcatccttaaagtagcgccccatagtggagatgtttttgcctggcgcgacgttgttggtccacgggccggactggttagcgtagataccggtaaatagtccggcccgtgcaggcgtacaaaccggactacaggtgtaggcggaattaaagcgaataccttccgccgccagactatcaatattttgcgtattcagcggtttaccgctatagcaaccgaccatattggtggcctgggtatcggtcatgacgaacagaaaattggggcgtttcataggctatccttcccgtcgggagtaaaggttacggctgggtcgtgacgatgccgccagctgtcaaaaatcaggtagacaatcactacggcggcaatgaaataactgatcatcgctaaccagcgcgtaccgtagccgccgaattcagccagcccggcatagacgccaatcatcgcgaacaggatgccaatactcgcgatcttgacgtttttccacggtttcatgtccaccgcaaacgcatctttgaaggtgaacggcgtggcgcgcggtttgataaaaccgatcaccagcatcacgaccacgttgatgcagaacgtacaggccagcacatagaggaaatggaagtcgaacttcaccagatagttgatggtgatgtagctgattatgccaatccccatcgctacttttgccgccagcgccgggatgcgcgggaagaaaaagcccataatgatgatggtaaccagcggcacgttgtaaatgccgttgagctgtttcatccagctatacagcccctgcggcgcgttggcgatccacggcgcgaccagcacgctaacgatagcgataaagaaaccaaatttgcgcccgacggtgaccagctgctgcggctcggcattctggttaatgatgcgacggtaaatacccatactgaataacgtactggcgctattcagaaagccgttgaaggtactgatcaccgcaccaaataacaccgcgccgaagaaacccaccattggcactggcagaacgttattgaccagcgtcgggtaggccatgtcggctttcggtaaatcctgatacagatgaaacgcaatcaaccctggcagcaccagtaccagcgggtcgagcattttcagcaccgccgttaacagcgcccccttttgcccttccgccaggcttttactcgccagcgtgcgttgcacgatgccctgatttgtacaccagtaaaaggtgttcaccagaatcaaaccggtaaatgccgcgccaatcggcaagggatcggtcgggccaccgatactgtttaatttctcggcgtgaacggtggtgagttgctcaatgccctgcataaagctgcccttgcccatcgcgattaggccaaataccggcaccatcaacccgccgataaccagcccaataccgttgatggagtccgccactgccattgcgcgcagtccgccgatcaccgcatacaaaattcccgccagaccaagcaaaattaccagtagccagatagccgcaccgtgagaaatctgtaggctttccccgacgtgaaacaggctgttgagcgccaacgcgccggagtagagaacaatcggcagaaagcagacgccggtggcaattaggaagcagaagtcgatgataatacgcgtcgttttatcataacgttcctccagaaaatcggggatggtggcaatgccgcgcttcagatagcgcggtaaaaagattagcgcgaggaagatcagcgtcaccgcactagtcacttcccagcccatcacgctcatgccgcttttgtaggcctgcccggaaaggccgaccagttgttccgtggaaaggttggttagcattaagctagcggcaataaccggcgcttttagactacgtccggcaagaaaatagccttgttggcttccggtatctgttttgcggaccttccaccaggtgatcaccgccaccagcagcgtaaaaccgacaaaactcaagatttgtaagctattcatctcatagcccttatttatgtttatgtcccggacgcatgaatatagggagaggtaaaatgcgtcgggtcaggcagtcagattcttaaaatacaaacgtcgtatccctgaacggattgttttctgttaagttcaggttgtgagcataattcgccggagggatattaaaatgaatggaaaattgcaaagtagtgatgtaaaaaacgaaactccgtacaatattcccttattgattaacgaaaatgtgatctccagcggaatttctctgatcagcctctggcatacctacgccgacgagcattaccgggtgatctggccgcgggacaagaagaaaccgcttatcgccaacagttgggttgcggtgtataccgtacaaggatgtgggaaaattcttttaaagaatggcgaacaaataacactgcatggcaactgtattatattcttaaagccaatggatattcactcttatcactgtgaaggtttagtctgggaacagtactggatggaatttacccccaccagtatgatggatattcccgttggtcagcaaagcgttatttataatggcgaaatttataatcaggaactcaccgaagttgctgagttaataactagtccagaagcaataaaaaataatctggcagtcgcttttctgacgaaaattatttatcagtggatttgtcttatgtacgcagatggtaaaaaagatccacaacggcggcaaattgaaaaattaattgccactttacatgccagtctgcaacaacgctggagcgtagctgatatggctgccacgatcccctgtagcgaagcctggttgcgtcgtctgtttttacgctataccggcaagacgccgaaagaatattacctcgatgcgcgtctggatctggcgctaagcctattaaagcaacaaggaaacagcgttggcgaagtcgctgatacgctcaacttcttcgactcctttcatttcagcaaagcctttaaacataaatttggttatgcgccgagtgccgtgctaaagaatacggaccagcacccaacggatgccagtccacacaattaacgtaactctggccagtacgctttgttggcctccagcaactcatccagaatagctttggcgacgctggcgctcggtaccgttttgctcaacgtaatcgcctgccacaggtgctgataactacgctgttcccaggcgtccacgaccagtttttccaccgccacttgctgactcattaaccctttctgaaactgcgggatatcgcgctccaccagtggttcaggccgtagtagcgcacgcgcatctgtttgcgatcttgcagcccaacaatttgcgccatccggctttcaataccgattggcatgtcacagatgttgaggattttcgcattcgggcgcagacgacgcgtggcttctgcgacaatggctgccgggttggagtagttgagcatccaggcatttggactatatttttccatataatccaccagttccaggacgccgccaatggaacgcatgccgtacgctattccgccgggtccgcaagtttcctgaccaacaacgccgtggcgcagcgggattttttcatccagttcgcgcatcgggtatttgccgacgcggatgtgcgccatgacaaaatcaacgtcgctgaatgccacttcaggatcggtggtgtaactaaacgcaatgtccggcgctttttctttaaggatgactttacaggcttcggcaatcacttcctgccgcgcaccatcgttatcataaaatttcagtgcacgaagcgggaaacggtcctgattcgccaggagcatcaacacgatgcctggcgtaaaggtgcttccaccgcctgcgacaaccacactgaatttggtcattatactgcctccgtaatggcaacattttctgcactttgatgagaattaattaagctatcgagctgttcacgcagctgagatacatgcagaccaatgatcacctgaatggcatcgccactacggaagacgccgtgcgctcccagctttttaaagacttcgtcatccagcgtttgactcatgtcatgcagtgcaatacgtaaacgcgtcgcgcaattgttaatgctggagatattgccgaccccgcccagggcttgcaggataccggcagcctgatccagctcttttttttggctctgccgcggtggtttggcctcggctggctttgtattcggctttactgtagagtttcacttccgcatcttcacgtcccggcgtgcacatgttgaactgcagaatcagtgtgcggaaaaccacgaagtacagcagggtaaagcacaacccaatggcgatttgggtcagcatcatatccgcgtggttgctgaacatcgggatccagttttgcggtaaaacttagtcaatcagacctccgcccatgttgcccaccacaccaaagagatacattacggtgctcatactggccgccagcacggcgtgtaccgcaaacagcaacggactaatgaacaggaaggtaaattccagcggttcggtaattcccaccagcatggcggttaaggttgcgggaatcagcaagcccgccacttttacccgattttccggtgcggcagtgaagtacatcgctaaagaaatgcccacggcaccaaagattttactgttaccgtgcagggcaaaaccgccttccgggaacaagcttttcagcggctcggcgctcaaactgaactcttgcagatgctgcgcccagtacatctgaatgccgccttcaacagctgccggaccaaagataaactgtccgtagatgaagtggtgtaaaccggttgggatcagaatacgttcgaggaaggtgtaaacccagaccccaagtgcacccgcgctacgcaggaacgcttgcagagattcaatccccatttgtacttttggccagccgagcaacgtcagccaggcacaggggatcatcaccaggaaggcgataatcaccacataagacgtcccctggaaaatgccgagaaaaaccggcagttttttatcgaacagacggttatgcagcgccgtcacaatgccggaaatgataattgcgccgataatgctggtatcgagggttttaatcccggccatcattgtcagaccgctacctgccaccgcgtcctgagtgaaatcgacgccgaagtagcttccccaggtcattcccatcgcgttgatgaaatagttccaggtcaggaaactcaccatcaccgccagacaagcacgcccctgcgcttgcttagcaaggccaatgggtaaaccgacagcaaaaatcagcggcatattacggaataccgtccaaccgccctcttcaataatgtgtacgatttgcgcgaataaactgttcggatcggtcagactttccccgacaaacatcgggttttgcagcaagatggcaagacccaccacaatcccggcgaagggaaacagcagcactggcgtgaacatcgcgccgccaaagcgttgaatttgactgagcatttccacatcctcttttctcaattctgtaagtaggaagcctgattggttatgcggcaggcctggagcgaggataggaagatgcgatcggcagaacatgacgacccaatgggattcgtgatcgctttcatgcttttcgttgggcggtagagatctacgttttcgcgaaaaagtagacctctgtgagcacaggtacacagcatcgaacacatctttaaaaaaaagatgttttttcaatcgattaagcagaacttgtgtgcgcattacccgggcttgcaggcaaaaaagagatctagagatgatctacaaaagcattgcggagcggttaagaattcgacttaactccgcagatttcacgctaaacagccttcttcccggtgaaaaaaagctggcggaagagtttgcggtaagccggatgaccatccgtaaagccattgacctgctggtagcgtgggggctggtggtccgccgccacggtagtggcacttacctggtgcgcaaagatgtactgcatcaaaccgccagtctgaccgggctggtggaggtgttaaaacggcagggaaaaacggtcaccagccaggtgctgatttttgaaatcatgcctgcgcctccggccattgccagccagttacggattcaaatcaacgagcagatctacttctcccgtcgcgttcgttttgtggaagggaaaccgctgatgctggaagacagctatatgccggtaaaactgttccgtaatcttagcctgcaacatctggaagggagcaagtttgaatatattgaacaagagtgcgggattttgattggcggtaattatgaaagcctgacgccagtgctcgccgatagactgctggcgcggcaaatgaaggtagcggaacacacgccactgctgcggatcaccagcttgagttatagcgagagcggggagtttttgaattatagtgtgatgttcagaaatgccagcgaataccaggtggagtaccatttacggcgactccacccggaaaagagttaaccgatactccagaagagcaccgccagtaattggggggtgataatgcgcaggaacattaccaacggatagacagtggcgtaagagagcgccgccgcaccgctggttggatgaagattattagcaaacgccagcgccggaggatcggtcatggaacctgccagcatcccgcacatggtcaggtaattcattttggctaacatccgcgccagaatgccaacagtaatcagcggaacggcggtgatcagggcaccataaccaatccagcttagcccttcgccattgaccagggtattcacaaaatccccaccagatttcagaccaacgacgctgaggaacagcacgatccccagctcccgcagcgcgaggttggcgcttggcggcataaaccagtacagcttgccgatactgccgatacgcccgaggatcaacgccataatcagcggtccgcccgccagccccagtttcaacgcggccgggaatcctggcacaaagacgggaatagaacctaacaatacgcctagcccgatgccaataaacactggcagcatctgaacctgttgcagtttttgctgcgcattccccagcacattggcaacggcatcaattgcggacggacgccccaccagattgaggatatcgccgaactgcaggctgatatcgccactggcgaccagttcgaccccggcacggttcaggcggctgataacaacgtcatagcgttctttaaagtgcaggtcgcgaatacgttttccgagcacgttttcattggtgaccaccacacgctcgacgcgcaaatcagtgcctttcgtggacaggctagtatcgacctcctgaccaatcaccagttgcgcattatgtaaatccgctggctgacccaccagatgcagcaaatcgcccagttggataatggtatctgggctaggaacttttagggtttcttcgcgtttcagacggctgcagataattttgtcgccgttgagaatcggtacatctttaatggctaaatcatgcaggttagggttctcaacgcgaatattgatagtcttgatcagcgcgccgccattggtgcgactagactcgtgctgctgagcttctgtctcgacattgacgcggaaaataacccgcaacatccacatggtgaacaaaatcccgcaaatgccgaatggatacgccatcgcgtaactcatccccatctgatcgaccatttccattggtgtacccaggtcgcgcaaaatctgctgccctgcccccagcgctggcgtattggtaaccgcaccggagaaaatccccagcactaccggcagtggaatatcaaacagtttatgcaggatggcggtaaccagaccaccgatgatgacgatcagaacagcaaacaggttgaggcgtaatccggagacgcgcaaactggcaaagaagcccggccctacctgaatcccgatagtataaacgaacaggatcaggccaaattcctgaataacatgcagcatatcgctacttaatgtcatccccgcctgagaaacaaaatggccgacgatgatcccaccaaacagcacgccgccaatacctaatcctatgccgcgaaatttgacgttgccgataaacaaaccgacgactgccaccaaagccagaatactgaccgttaatgctatatcactcatcgtccatttctcttgagataacattttaattgctacggattatggctgaatcggtgaagcagatttgccttatagcgcacattatcacgggaaagaacgtgccgaaatatcttaaacagtcgaaatttaacgcattgttgagtaagtaagacaaaaaaagccccaccagaatggcggggcaaagagaatagctagttagctatttaacgcgggacgttcgctgatagcgatacgctgcgctgcgatgggttcaggctcattacgaattaaatcaatatgcagtaaaccgtttacgaaggttgcgccagagacttccatattttcagccagcgtaaagctcaggctaaatggctgattcataagcccttgatgcagccattttttctcttcttttggctgctccggcgtgccttttacgctcaggcgcgtaccttccagttgaatctctaaatcttcctgacggaaacctgccagcgcaagggtaatgcggtagtggttatcgtcgcttttctcaatgttgtacggcgggaagctctggctttcaccggcgttttgcagtgcgttggccagtttgtcaaaaccgatccattgacgcatcagtggggataaatcgaagttacgcatagtcatttctccttctaagaagcgagtaagtacctgcaaatccgaagattcgcatatgctccctgacggcgagcatggagatgtcaggccgcgccaggcggccttagggaattagttgatttcgatacggcgcggttttttcgcttccggaatcacgcgttcgagatcgatatacagcaaaccatttaccaggttagcaccacgaacatgaatgttctcagctaactggaatttgcgttcaaagttgcgttcagcgatgccctggtacagataggtgcgctctttttgttcgtcggcgtgagcacctttcaccaccagcagattatcctgggcggtaatttccagttcgctctcagcaaaaccagccacagcgatagcaatgcggtaatggttttcgtctaccagttcaacgttatacggagggtagccgccattactctggctctggttgttttctaagtggttaaacaaacggtcaaatccaatagcagaacggtaaagcggggataaatcaaagttacgcataatcaatagctcctgaaatcagcgagaatgtaagaccttccacaatggacaggtcaggtagccagaacacccatcaggcgcgtcctcatcggctacgatgtaaaaatgggtctggaaatgaacttttcaagccttatcagcggacttttttttgcagtttatggtctattgcatagactgagggggcagcacgaaacgttaaagtgcgatagccgccacagtgcgacgtaatgatgatgttattttcagcaagggatcgctataactcatcaggccaacacccacgatcaacagatgaatttattatgataagaaatgtgttgttagcgttcatgatatgcagcggaatgacattactcggaggatgctccagcgtgatgtcccataccggagggaaagaaggaacgtatcccggcacccgcgccagcgcaaccatgattggcgacgatgaaaccaactggggcactaagagcctggcgattctcgatatgccgtttaccgctgtgatggacacgcttttactgccgtgggatgtgttccgcaaagacagcagcgtgcgcagccgcgttgaaaaaagcgaagccaacgcgcaagccaccaatgcggttattccaccggccagaatgcctgataactgatttagcgatcagtttcggtgatccacagctggccgccttccatccacgccagccactgaccatccgggctgaagaccacggcgtccgcagaaggactattggcgtggtgttcggttaaatactcaacctcgccgctttgcgcatgggcacaagcaattcgattatccagcacaaagcccaaccattctccactcggatgccagttaaatgcagactgaatatccgttttgttatgggttaactggcgcggctcgccgccctgtgggctgataagccacagttgcacaatgccgttatcatctcgcattaaaaacgcgatttgtgtaccctgcggattacagcgcacccagtggcgcgggacgttgactaaccccggataagcccgatggtgggtaaaggttaaacgtcgctgcacgacgccacgcggtggcgcgggcagggttgtttccgttccgcttaacggcgcatcacctgccgctttccagccagcttcatcttgcggtaactcaacgataaacagctccggcactttctcgccctttgggctaagtgtgtcgccaataaatgccagcgcgtgatttcctacccatccttcttcataagcacgattgatttcatcactgccaggctgtggcgtgggcgtggttttgctcaccagcacgcaccagtggctaccgctgtattcacgcggatgctgcttttgtacgttgaccgggccaaacggcgcagcaacaccgacgtttcgcaaatccagcgccggatcgagttcatgcattacatggtcgttataggtaaagctcaccctttcaccgttcgggctaaagacatgcacatggctgccgccgcgcagcactcctggcgtatacggcgcggtaatatccatcgcatcaaggttactcatcttgccgccttcaacaatcactccgcgccgatgatggaagtcgtaatgccatgtttcatcaggattttccgggccgtggatgaaaacatatttctcactcttcggatgaacggtcaccacgccgacgtgtgcgccctgactcgcgcgatagataacctcgacctcgccggtatggatattcacacgctcaatggtctcgccggtaaagctcgcgccagaaggacgcacgtcaaataccagccactggctgtcgggcgtccaggtattggtattggtgagcaggtgattacggggagcaaaggttatctgtttcatggcgcggtcctgatacaaaacgggtcccgccatcatacttcacaaggacttcactttcagacaatagtcttttgccatcgtgatgaatgtgagtgaaaagatggaacatttcgacgtggcgattattggcctcggcccggcaggaagcgcgttggcacgaaagttagcaggcaaaatgcaggtgatcgcgctggataaaaagcaccagtgtggtactgaaggtttcagcaaaccctgcggcggtctgctggcaccggacgcgcagcgatcttttattcgcgatgggctgacgcttcctgtcgatgtgatcgctaatccgcagattttcagcgtcaaaaccgtcgacgtcgccgcaagcctcacgcgtaactaccagcgaagctatatcaatattaatcgccatgctttcgacttgtggatgaaaagcctgatccccgccagcgttgaggtttatcacgacagcctgtgccgaaaaatctggcgtgaggatgataaatggcatgtcatttttcgtgcagacggctgggagcaacatattaccgcccgctatctggtcggtgccgatggcgcaaacagcatggtgcggcgacatctctacccggatcatcaaatccgtaaatatgtcgctatccagcagtggttcgcggagaaacatccggtgccgttctactcctgcatctttgataatagcataactaactgttatagttggagtatcagcaaagacggttattttatctttggcggtgcctatccaatgaaagacggtcagacgcgtttcacgacgctgaaagagaaaatgagcgcctttcagttccagtttggtaagacggtgaaaagcgaaaaatgcacggtgctgtttcccagccgctggcaggattttgtctgcggtaaggacaacgcctttctgattggtgaagcggcgggatttatcagcgccagcagcctggaggggattagctatgcgctggatagcacagacattctgcgtagcgtgttactgaagcagccagagaagctcaataccgcttactggcgcgccacccgcaaactgcgtttaaaactcttcggcaagatagtaaaaagccgatgcctgaccgcaccggctttaagaaagtggattatgcgcagtggtgtggcacatattccacagttgaaggattaaccaacgcgcttcacatcgcccaccagcaggatataagagagcgcgccaatcaacgcgacggcggagatataaaccagtgcaggtgcgaaaccgtaaccctgcgccaggtaccccaccaccagcggaacggtgatgccgcccagaccaccggcgaagttaaacacgccgccggttaaaccaatcaggcgcatcggtgccagagaagaaaccaggctccaggtaatgctagcaaaaccgttaccgaagaatgccagcgccatcaggcacataatcatcatcggatcgttagtgtagttagcgcccataatgcaggtggagatcagcaagccgcagataatcggcgttttacgcgcaaagcccagactaaagcccttacgtaccagcagatccgctacccagccagagagcaggacgccgacaaacgccgcgaggaatggcaccgtggtcataaagcctgctttcagcgccgtgattcctttttcctgggttaaatagttcgggaaccaggttaagaaaaaccacagtgtagaagccaccgcaaattgcccaagataaacgccgatcagtttacgatggaacaccagtttccagtctttggctgttaacggctgacgcgcctctttcttcaccggcgcatcaccatccaccagaccgccgccatcacgaatgtaatccagttcagctttgctgatacctttggtcaggcgcggcggctgataaaccttaaaccaaatcaggctccagataatgccgataccaccagtgacaatgaacacccagtgccagctcaacatctcctgaatccagatcagcagcggcgtcagaaacgccagaccgacaaactgaccagacgtataaaaaccaacggcagaagcgcgttcatgttccgggaaccagctggtcaccatccggttattggtcgggaaagcaggcgcttcgaaaataccggttatcgcgcgcagaccaattaaactcattaagcccgtggcaaagccctggaataaagtcgccacactccagccaaatatcgcaataaaataagtcacgcgagaacctacgcgatctaaaaaccaaccgccggggatctgacatagcgtataaagccaggcgaaggcgctaaatacatagcccatttccgctttggtaatgccgaactcttcctgaatatgggcggaagccacggccaggttggcgcggtcgacataacaaatgactaccgtaataaagatcatcaccagcgtcagataacgccgacgccccggctttgctgcattaacgggaatatccatagcgagctttctccagattttgggcatagcgaagccgctcaccatgccctgtaatttacagagggttatatttttgtattgctgttttagtgcccgatgaggggcttacgtggcaggaattaccactctgctacgctgttatcttcatgacgccagagcggattacgccagtccggggcatttttactgaactcaatcactttagcttcgtcgatttccacgcctaagcccggtttcgttaacggtttaaagaagccgccgaccatgctgaagtcttctttgtttttcacaaagtcgagtaactccgcgcctttgttgtaatgaattcccatactttgttcctgaagtacggcgttataggaaacaaagtcgatatgcaggcaagccgccagtgcaatcggtccgagcggacagtgcggcgcaagggtcacgtcataggcttctgccattccggcgattttgtagcattcggtaataccgcccgcgtgggagagatccggttgcagaatgctaataccacctgcctccagcacgcgtttaaaatcgaagcgactgaacatgcgttcacccgccgccagtggaatatgcgtttgtgccgccagtttcgggtagtattcggcttgttccgccagcaccggctcctcaataaacagcgggcgatacggctccagttctttaatcagcactttcgccatcggcgcgctgacgcgaccgtggaaatcaagaccaaactcaatctgattgccaaaagcttcacgaatttgtgccacggtgttaaccgccgcatctaccgcgcgggagttatcaattagccccagttcttcacaaccgttcagtttgaaggtatcgaagccgatttcgcgtagcgttttaatgccgtcgataacatccgccggacgatcgccgccaacccaactgtaggctttaattttgtcgcgaaccaggccgcccatcagttgccagaccggcgcattcagcactttacctttgatatcccataacgcctggtcaatcccggcgatggcgctcatcaggatcggaccgccgcgatagaatccggcgcgatacatcacttgccataagtcattgatgcggcttggatcctgaccaatcaaatagtcacccagctcgtgaactgccgcttccaccgtacgggcgcggccttcgatcacgggctcgccccaaccgaccacgccttcatcggtttcaattttcaggaacatccagcggggaggtaaacgatacgtggtaattttggtgattttcattgcactgcctctcgatacgccttaacaaatgctgctgcctgctgcgcggtgcgctctacggattgcccggcgcgatagagatcgctgcctaagcccgcccctgcacaacctgcgtctatccactgcgccaggttttctggcgtcacgccgccaacggcaaagactgcgatgtcgcttggcaataccgcttttaacgctttgatgtattgcggaccaaaagcgctactcggaaatattttcagcgcctgcgcgcccgcttcgagcgcggtaaaggcttcggtcgccgtcgcgcagccggggcagacggtcatgccgtagcccaccgcacggcggatcacttcactatggatattgggcgtaacgatgagctgacagcccatcctggcgagcgcatcgacctgttcaggtttcagtaccgtacctgcgccaatcaacgccttgtcgccgtacgcatcaacgatggcgggaatgctttgctcccattgtggggaattcagcgggatttcaaccgcgtcgaacccggcgtcaatcaccgcgccaacatgcgccagcgcctcgtcgggcgtaataccgcgcaaaatggcgatcagcgggagtttagtttgccactgcatgagcgatgctccttataccagcctgaaatgccgtgtcgcccgccaccgccgtcacgtcgcaacccatcgcctgaaaggcttgctggtagcgcgcggtcaggcttgttccggcgacaagggtgatggcgtgttgatgggccacatagtcgcgcatactggcgacctctgcgccaatcaacaaaccagagagaaattcgctgacctgttcgcggggaagtgttcccagcacatggctggcgcgaacttcaaaaagctgcggcaatatggcgggcgtattaagaccacgctcaaggccagctgtgaaggcatcggcagagttttcctgcggcggcaaacctgcgccaatcaaactgtgatttaacagtaaatgatgtaattcaccggtcatcacggtgcgaaaatcgttgatttgctggctatcggcctgcacccatttgcaatgggttccgggcatgacataaagagaggaaggagccagagctcgcgcgccgatcaattgtgtttcttcgccgcgcatcacattgtggttatcgtcatgagagacacataatccgggaataatccagatattgtcgccaacactcgttaattgttcgccaatagagctaaaacaggcaggaacagataaatacggtgcaactttccagccgacgttgctgccaaccattcctgccattaccactggcgttttctcttcacgccagtcggtcgtgacttctgctaacaccgcagccggagattttccgttcaggcgcgtgacgcctgcttcactttgcctgctctccaggcagtggtcgccctgataaagccaggcgcgcagattggtgcttccccagtcaattgcgatgtagcgagctgtcatgtgatttcctttaaccttcgtgtgctgctggcgatcatggtaagcgccgcctgctctgccgcatcgccgtcctgatgtcgtatcgcatcgaacagcgccttatgttcctggagcgtttgcggcatgttggcctcatcgcccatccaggttcgttcaaaaaccgcccgctgcaggctactgatcgcaatgctaagttgctgtaacaccgggttatgcacgctctgcagcaccgcctcgtggtagcgaatatccgcttcgttaaacgcttcgcggtcctgattgttggcaatcatctcgttcagcgcgctttcaatctgcgccagatcgctggaagtcgcgcgctctgctgcccaacgggcaatcgccggttccaccagatttcgcacttcgctcatggcactgataagccgtgggtcgtagtcattttccagcacccattgcagtacgtcagtgtcgaggtaattccactggttacgcggtgccacaaacgccccgcgataacgtttcatttcaatcagccgcttcgccatcaggctacggaacacctcacggatgatgttgcggctggttgcaaactcctcacagagttccgcctcagccggaagcgggctgcctggcacgtatttgccgtgaacgatctgtttacccagcgtaatgacaatgcgatcggttttattgagagtcatggagagtccttgtgctctgtatgttcttctctactttaccccgatcgatgcataacgcggcaactttgtagtaccagcgtgatgacgttcgcgtttgccgtgcgtgtaatgtagtacaaacttatattgttgtactacaatttagatcacaaaaagaacaatgcataaaaaaatgacatgcgtcgggcagaaatctgaaaagggatatcaggcgctaaacaggagggaaagaagagtatgctttcaacggcttagctactcgtttaaaggattaatcatgaagttgaattttaagggattttttaaggctgccggtttattcccactggcgctgatgcttagtggctgtatcagctatgctctggtttcccataccgcaaagggtagtagtggaaagtatcaaagccagagtgacaccatcactgggctaagccaggcaaaagatagtaatggaacaaaaggctatgtttttgtaggggaaagcctggattaccttatcactgatggtgccgatgacatcgttaagatgctcaatgatccagcacttaaccggcacaatattcaggttgccgatgacgcaagatttgttttaaatgcggggaaaaagaaatttaccggcacaataagcctttactactactggaataacgaagaagaaaaggcactggcaacgcattatggttttgcctgtggtgttcaacactgtaccaggagtctggaaaacctaaaaggcacaatccatgagaaaaataaaaacatggattacagtaaggtgatggcgttctaccatccatttaaagtgcgattttatgaatactatagtcccagaggcattccggatggtgtttccgcagcattactgccagtgactgttacgctggacatcattactgcaccgctgcaatttctggttgtatatgcagtaaaccaataatcagtaagcgggcaaacgcgtttatgctgtttgcccgcccacagattaattcagcacatacttctcaatagcaaacgccacgccatcttcaaggttagatttggtgacaaagttcgccacttctttcacactaggaatagcgttatccatcgccacaccgacgcctgcatattcaatcattgcgatatcgttttcctgatcgccaatcgccatgatttcttccggtttaatacctaacacgtcggccagacttttcacccccgtacctttgttaacgcgtttatcgaggatttcgaggaagtacggcgcacttttcagcacggtatatttctctttcacttcctgcggaatacgcgcgatagcctggtcgaggatggcgggttcatcaatcatcatcactttcaggaactgggtattggggtccattttctccgcttcgcagaacaccagcggaatggtggcaacgaaggattcatgcaccgtgtagtagctgatatcacggttggcggtgtacagcgtggtgcggtccagggcgtggaaatgagaaccgacttcgcgagagagtttttccaggaaacgatagtcgtcatagctgagagcagtttgcgccacggtgctaccatcagcggccttctgtaccagcgcgccgttataagtaatgcagtagtcgcccggctgttccatatgcagctctttcaggtagttgtgcacacctgcatacgggcgacccgtcgttagcacgacattcacgccacgggcgcgagctgcggcaatcgcatttttaacggcgggactaatggtgtgatcgggcagcagaagggtgccatccatatcgatagcaatgagtttaatagccatgagttccccaggtagattggttcctgacccatgctaacgcgattccgctcaaaaatcagtacaacacccgagggaaaagggggatgcaacgcgcgttgcgtgctccctttttgcttagcggaagagtttccctttcagcagttccatgcctgcggaaagcagatcgttattggcttgtggactcacttcaccttgcggactgagcgcatcaataatcttcggcaattgttctgccagtaaactggaagctgtactggtatccacgccaagtttttgcccgagatcggacaccgcatttgtgccgagcgcgctttccagttgctcgccactaacgctttgattgccctgttgattactcagccaggtactgagaatggcccctaagccgccactttgcagtttttccagcagcacctgaatgccgccctgctcctcaacccaacttaaaatagcctgatatttccccgcatcgcctttcagaaaggcaccgacaacttcatcaaaaagccccatgataatcacctgtaaagcgttacgtgttgacccaaaaagtatagatttgcgggatgataattgcggattgcagaaataaaaagggcggagatgatctccgcccttttcttatagcttcttgccggatgcggcgtgaacgccttatccggcctacaaaatcatgaaaattcaatacattgcaagattttcgtaggcctgataagcgtagcgcatcaggcacgctcgcatggttagcgccattaaatatcgatattcgccgctttcagggcgttctcttcaataaacgcacggcgcggttcaacggcgtcgcccatcagcgtggtgaacaactggtcggcagcaatcgcatctttaacggtaacgcgcagcatacgacgactttccgggtccatagtggtttcccacagctgttccgggttcatctcgcccagacctttataacgctggatggagaggccgcgacgggactctttcaccagccagtccagcgcctgctcgaagctggctaccggctgacgacgctcgccacgttcgataaacgcatcttcttccagcaagccacgcagtttctcacccagcgtgcagatacgacgatattcgccaccggtgataaactcgtgatccagcggatagtcagtatccacaccgtgggtacgcacgcgaacaatcggctcgaacaggttttgctcagcattggtgtgaacatcaaacttccactggctgccgtgctgttctttgtcgttcagttcgctgaccagcgcgttcacccagcgggtaacggtctgctcatcagaaaggtcagcttccgtcaacgtcggctgatagataagctctttcagcattgctttcggataacgacgctccatacgattgatcattttctgcgtcgcgttgtactcagataccagtttctctaacgcttcgccagccaatgccggtgcactggcgttggtgtgcagcgttgcgccgtccagcgcgatagagatctggtactgatccatcgcttcgtcgtctttaatgtactgttcctgcttgcctttcttcactttgtacagcggcggctgagcgatgtagacgtgaccgcgttcaacgatttccggcatctgacgatagaagaaggtcaacagcagcgtacgaatgtggctgccgtcgacgtccgcatcggtcatgatgatgatgctgtgataacgcagtttgtccgggttgtactcgtcacgaccgataccacagccaagcgcggtgataagcgtcgccacttcctgagaagagagcatcttatcgaagcgcgctttctcgacgttgaggattttacccttcagcggcagaatcgcctggttcttgcggttacgcccctgcttcgcagagccgcccgcggagtccccttccaccaggtacagttcggaaagcgccggatcgcgttcctggcagtctgccagtttgcccggcaggcccgctaagtcgagcgcacctttacggcgggtcatttcacgcgcgcgacgcgccgcttcacgggcacgggcagcatcgataattttgccaaccacgattttcgcgtcggttgggttttccagcaggtattctgccagcagttcgttcatctgctgttcaaccgcgcttttcacctcagaagaaaccagtttgtctttggtctgggaggagaatttcgggtccggcactttcacggaaacgaccgcaatcaggccttcacgcgcatcgtcaccggtggcgctgactttggcttttttgctgtagccttctttgtccatgtaggcgttcagggtacgggtcatcgccgcacggaagcctgccaggtgagtaccgccgtcacgctgcggaatgttgttggtaaagcagtagatgttttcctggaagccatcgttccactgcaacgccacttcgacgccaataccgtctttttcagtggagaagtagaagatattcgggtggatcggcgttttgttcttgttcagatattcaacgaacgccttgatgccgccttcatagtggaagtggtcttctttgccgtcgcgcttgtcgcgcagacgaatggaaacgccggagttgaggaagctcaactcacgcagacgtttcgccagaatttcatattcgaactcggtcacattggtgaaggtttcgaggctgggccagaaacgcaccatggtgccggttttttcagtctcgccggtaaccgccagcggggcctgcggtacaccgtgttcgtagatctgacggtgaattttaccctcgcgctggataaccagctccagtttttggctcagggcgtttactacgctaacaccaacgccgtgcagaccgccggacactttataggagttatcgtcaaatttaccgcctgcgtgcagaacggtcatgatcacttccgccgcgcttacgccctcttccgggtgaataccggtcggaatgccgcgcccgtcatcctgtacagagacagagttatcggcgtgaatggtgacgataatttctttacagtgacccgcgagcgcttcgtcgatagcgttatctaccacctcgaataccatgtggtgcagaccggtgccgtcatccgtgtcgccgatatacatacccgggcgcttacgcaccgcatccagccctttcaggactttgatactggaggagtcataagaattgctcatcaacgtttctcgctcatttatacttgggttaatccgttattttacccttttccacggtaaacatcttgctattttcgtcgctcatgtctataacgtgttcagcactgatcgcgctgacaaagacctgactttgcgtcgcttttaagcggctggcaagcagcccgcgacgctcatcatcaagctcagaggcaaaatcatctatcaggtagagacaccgccgcccgctttcacgggtgaggaactctccttgcgccagacgtaaggcgcacatcaacagcttaagctgcccacggcttaaggtatcttccaccggcgcaccgtcggcgcgaatgcgtaagtccgctttgtgcgggccgtgcgcggtgtaggttagctggcgatcgcgttcaaaattacgttccagcacctcagcatattctgtctctttctcccagccgcgctggaaagagaaagtcagagaaaactcagggagaaattgcttacaggtatcagccatatcggccgcgataccggcgctatactccgcgcgccaggtgctgatttgctccgccagcgggatcagctctttatcccacgggcgtagctgttcgtaacgtgtcacctggcgcagcgccgcattgcgctgcttgagcaatcgcttgagattgctccaggcggtgaaaaatccgggttcgttgtgaaagcatccccagtcgaggaatgctcttctgtatttggggccgccgttgagtaaagtaaacccttctggcgttatcaactgcattggcatcaggtgcgccagttccgcgaccttatgcccgtctgtaccgtcgatgcggactttgctgtcgccctgtttgtctttggttaagccaatcgctgtctcgcgctcttcgccctgtaatcgcccgtggagaacaaacgcctcctgctcatggcgaatgacgcgaccaatctgcaaactgcgaaacgcccgaccatggccgagcgtatagatggcttccagcacgctggttttgccactgccgttggcacctaccagaaagttaaagccgggagataaggcgagatccgcggtttcaatgttgcggaaatcgcggatcaacaagcgggtgagggacattacagtctcattggcatgacaacataagccgcgctctggctggccgcatcttcaatctgcacgctggaaacgctatcggtcagcatcatgcggacgttttcgcatttcagcgcgttcagaacatccagcacataactgacgttgaagccgatttccatctccgcaccgctataggtaacgtcgaggatctcttccgcttcttcctgttccgggttgttggcggtgattttcagctggttttcgctgacataaagacgtacgccgcggaatttctcgttagagagaatcgccgcgcgagcaaacgcctgcttgagcagatcgcagccagcttccagatgtttgtccgggttcttcggcagaacgcggcgataatccgggaagcgaccatccaccagtttggaggtgaagataaagtcgccaacgtgggcgcgaatgttgttgctgccaatctgtacgcgcagcggattgtcgccgccgtcgagcatacgcatcagttcaatcacgcctttacgcggtacgatcacgctatggcttggcaaagattgaccaattggcatactacagaccgccagacggtggccgtcggttgccacggtgcgcagttcttcaccttcggtttcaaacagcataccatttaagtaatagcgaacgtcctgatgcgccatagaaaactgggtcgcttcaatcagacgcttcatcgttgcctgcggcagggtaaattcgacttcactctgccagtcatcgaggttcgggaaatccgccgctggcagggtagacaggctaaaacggctacgcccggagcgtaccagcatccgttcaccttccagctgcacggcaatttccgcgccttcaggcagaccacggcagatatcaaagaatttgcgcgccggaacggtcgtcgctcctggctcgtgtggctgaaccagcgcaacacgtgccaccatttccatctcgagatcagtaccggtcaggctcaacgtaccgtcagcaacctgtaacagcagattaccgagaatcggtagcgtaggacgaccacctaacggaccgctcacctgttgtagcggttttaataaatgctcacgttctacggtaaatttcataggtttagctactcaatgttctgattaaattactaaaatcttctttgatatcgtggctctcttcacgcaactgctcgatcttacggcaggcatgaagcaccgtcgtgtggtcacggccaccaaacgcatcgccaatctccggcagactgtggttagtcagctctttcgccagcgccatcgccatctggcgcggacgcgccacgctgcgggatcgacgcttggaaaggagatccgcgactttgatcttgtagtactccgccaccgtcttctgaatattgtcgatggtgaccagtttttcctgcaatgccagcaagtcgcgcagcgcctcacgcacgaagtcgatggtgatcgcccgtccggtaaagttggcattggcaatgacgcggttcagcgccccttccagctcacgtacgttagatcgtagacgcttggcgataaagaacgccacttcgcccggcaaacgaatgtcgttttcgtcggcctttttcatcaggatcgccacacgggtttccagctctggcggttcgatcgccacagtcagtccccaaccgaagcgggatttcaaacgatcctcaacgccgttgatctctttcggatagcgatcgctggtgagaatgatctgttgattaccttccagcagggcgttgaaggtgtggaaaaactcttcctgagatcgttctttattagcaaaaaactgaatatcgtcgatcagcagtgcatctacggaacggtagtagcgtttaaactcttcgatcgcgttgttttgcagggctttaaccatgtcctgaacaaagcgctcggagtgcatataaaccactttggcattcggcttgcgcgccataatgccgttacccaccgcatgcagcaggtgagttttacccagacccgtgccgccataaaggaacaacgggttataggcaccgccagggttatccgccacctggcgagccgccgcgcgcgccagttggttagatttaccttcaacgaagttatcaaacgtgtgtttgacgtttacgttagaacgataggtcggttctgccggggccgggacgttatcccaaccactgcgcgtagaaggcgcagcacgttgcggctgcgtttgcgccacctgtgcaggggccgcgacgttgctcgtcactgccgcttgtggcgtttgcgtcaccggtttggtgccgacttcaaaacgcagctgtggggcatccgctccgcagaaactggttagcagtccattgatattattaaggtacttgtcccgtacccaatcgaggacaaaacggtttggcgcgtacagggccagcgtgttatcgctcagttccgcctgcaatgggcgtatccacatactgaattctgtggctggtaactcatcctgcaatcgggcaagacactgctgccaaaggctaagactcacggcggactccactcgaacaaaagtcgataatgactaaggctgaaacattcatgattgttgacgtacgtcgaaaagaccctgcttgagggtgacgcacgaaccgctgtctgcggttatatgcccgatcaagatcctgcaaaacgatcgggaccgcggatcatagcctaaactgcgcaagagatcttctgtttctcacagattttcccgatttatccacaggactttccagaactcgctaagtgtaaacgatcctgccgcgaggcgggcacgatttacgccgcatattggaaaatttaatgaccatagacaaaaattggcttaatcgatctaataaagatccaggacgatccttgcgctttacccatcagcccgtataatcctccacccggcgcgccatgctggtttccactggtgtgaggtcgtacattttccctgcgaaaaggtgcggaaaagcgcggtaaataaggaaagagaattgactccggagtgtacaattattacaatccggcctctttaatcacccatggcttcggtgtccatcgtttcatttttcggcggatatccaataaagccattgaatttattcaagtttaggtagaaatcgccatgaaacgcacttttcaaccgtctgtactgaagcgcaaccgttctcacggcttccgtgctcgtatggctactaaaaatggtcgtcaggttctggcacgtcgtcgtgctaaaggccgcgctcgtctgaccgtttctaagtaataaagctaacccctgagtggttaagctcgcatttcccagggagttacgcttgttaactcccagtcaattcacattcgtcttccagcagccacaacgggctggcacgccgcaaattaccattctcggccgcctgaatagcctggggcatccccgtatcggtcttacagtcgccaagaaaaacgttcgacgcgcccatgaacgcaatcggattaaacgtctgacgcgtgaaagcttccgtctgcgccaacatgaactcccggctatggatttcgtggtggtggcgaaaaaaggggttgccgacctcgataaccgtgctctcagcgaagcgttggaaaaattatggcgccgccactgtcgcctggctcgcgggtcctgacttaatcggaagcgttggaaaaattatggcgccgccactgagccctggcagccgggtcctgatagccctcattcgggtctatcaacgcctgattagtccgctactcgggccgcattgtcgtttcactccaacctgtagtagctacggaattgaggcattgcgcaggtttggagtgataaaaggcagttggttgacggtgaaacgcgtattaaaatgccaccctttacaccctggtggtgacgatcccgtcccgcccggaccatttgataccagagaacactaacgatggatagccaacgcaatcttttagtcatcgctttgctgttcgtgtctttcatgatctggcaagcctgggagcaggataaaaacccgcaacctcaggcccaacagaccacgcagacaacgaccaccgcagcgggtagcgccgccgaccagggcgtaccggccagtggccaggggaaactgatcagcgttaagaccgacgtgcttgatctgaccatcaacacccgtggtggtgatgttgagcaagctctgctgcctgcttacccgaaagagctgaactctacccagccgttccagctgttggaaactagtccgcagtttatttatcaggcacagagcggtctgaccggtcgtgatggcccggataacccggctaacggcccgcgtccgctgtataacgttgaaaaagacgcttatgtgctggctgaaggtcaaaacgaactgcaggtgccgatgacgtataccgacgcggcaggcaacacgtttaccaaaacgtttgtcctgaaacgtggtgattacgctgtcaacgtcaactacaacgtgcagaacgctggcgagaaaccgctggaaatctccagctttggtcagttgaagcaatccatcactctgccaccgcatctcgataccggaagcagcaacttcgcactgcacaccttccgtggcgcggcgtactccacgcctgacgagaagtatgagaaatacaagttcgataccattgccgataacgaaaacctgaacatctctagcaaaggtggttgggtggcgatgctgcaacagtatttcgcgacggcgtggatcccgcataacgacggtaccaacaacttctataccgctaatctgggtaacggcatcgccgctatcggctataaatctcagccggtactggttcagcctggtcagactggcgcgatgaacagcaccctgtgggttggcccggaaatccaggacaaaatggcagctgttgctccgcacctggatctgaccgttgattacggttggttgtggttcatctctcagccgctgttcaaactgctgaaatggatccatagctttgtgggtaactggggcttctccattatcatcatcacctttatcgttcgtggcatcatgtacccgctgaccaaagcgcagtacacctccatggcgaagatgcgtatgttgcagccgaagattcaggcaatgcgtgagcgtctgggcgatgacaaacagcgtatcagccaggaaatgatggcgctgtacaaagctgagaaggttaacccgctgggcggctgcttcccgctgctgatccagatgccaatcttcctggcgttgtactacatgctgatgggttccgttgaactgcgtcaggcaccgtttgcactgtggatccacgacctgagcgcacaggacccgtactacatcctgccgatcctgatgggcgtaacgatgttcttcattcagaagatgagcccgaccacagtgaccgacccgatgcagcagaagatcatgacctttatgccggtcatcttcaccgtgttcttcctgtggttcccgagtggtctggtgctgtactatatcgtcagcaacctggtaaccattattcagcagcagctgatttaccgtggtctggaaaaacgtggcctgcatagccgcgagaagaaaaaatcctgattcggtgagttttcgctaaaataagggcggtcagttgaccgccttttttcttttcgtagggcggataagcaccgcgcatccgccacacaaagcaacaggaacatcatgagcgataatgacactatcgtagcccaggccacgcctccgggacgtggcggcgttggcatcctgcgcatctccggcttcaaagcccgtgaagttgccgaaaccgtgctgggtaaactgcctaagccgcgctacgccgattatcttccgtttaaagacgccgacggcagcgtgctcgatcaggggattgcgctatggttccctggcccgaacagcttcaccggcgaagatgtgctggaactgcaaggtcatggcggtccggtgatcctcgacctgctgttaaaacgcattctgaccattcccggcctgcggattgctcgccctggtgagttttccgaacgcgcgtttcttaacgataaacttgacttagcccaggccgaggcgattgccgatcttatcgacgccagtagcgaacaggcggcccgtagcgcacttaacagcctgcaaggcgcattctccgcacgggttaatcatctggtagaagccctcacccacttgcgcatttacgtcgaagcggcaattgatttccccgatgaagagatcgatttcctctccgacggaaaaattgaagcccagctcaatgacgttattgccgatcttgatgcagtgcgtgctgaagcacgtcagggtagtttgttgcgcgaagggatgaaagtggtgattgccggacgtcctaacgccggtaaaagcagcctgttaaacgcgctggcggggcgtgaagcggcaatcgtaaccgatatcgccggaactacgcgtgacgtgctgcgtgagcatatccacattgacggaatgccgctgcatatcatcgataccgccgggctacgtgaagccagtgacgaagtagaacgtattggtatcgagcgcgcgtggcaggaaattgaacaggccgaccgcgtgctgtttatggtcgatggcaccacaacagacgccgtggatccggcagagatctggccggaatttattgcccgtctgccagcgaaactgccgatcaccgtggtgcgcaataaagccgatatcaccggcgaaacgctgggaatgagtgaagtgaacggtcacgcgttaattcgtctcagcgcaaggactggtgaaggcgtggacgtgctgcgtaaccatctcaaacagagcatgggctttgacaccaacatggaaggcggcttcctggcgcgtcgtcgccacctacaggcgctggaacaggcagcggaacatctacaacagggcaaagcgcaactgttgggagcctgggcaggtgaactgctggcggaagagttgcgtctggcacagcagaacttaagcgaaatcaccggggaatttactagtgacgacctgctggggcggattttctccagcttctgtattggtaagtaaccgcgcttacgaggccgcattctgactgtcagatgcggcttcgcttcattgttaccactcctgttattcctcaaccctttttttaaacattaaaattcttacgtaatttataatctttaaaaaaagcatttaatattgctccccgaacgattgtgattcgattcacatttaaacaatttcagaatagacaaaaactctgagtgtaataatgtagcctcgtgtcttgcgaggataagtgcattatgaatatcttacatatatgtgtgaccagtaaatggttcaatattgacaacaaaattgtcgatcaccgcccttgatttgcccttctgtagccatcaccagagccaaaccgattagattcaatgtgatctatttgtttgctatatcttaattttgccttttgcaaaggtcatctctcgtttatttacttgttttagtaaatgatggtgcttgcatatatatctggcgaattaatcggtatagcagatgtaatattcacagggatcactgtaattaaaataaatgaaggattatgtaatggaaaactttaaacatctccctgaaccgttccgcattcgtgttattgagccagtaaaacgtaccactcgcgcttatcgtgaagaggcaattattaaatccggtatgaacccgttcctgctggatagcgaagatgtttttatcgatttactgaccgacagcggcaccggggcggtgacgcagagcatgcaggctgcgatgatgcgcggcgacgaagcctacagcggcagtcgtagctactatgcgttagccgagagtgtgaaaaatatctttggttatcaatacaccattccgactcaccagggccgtggcgcagagcaaatctatattccggtactgattaaaaaacgcgagcaggaaaaaggcctggatcgcagcaaaatggtggcgttctctaactatttctttgataccacgcagggccatagccagatcaacggctgtaccgtgcgtaacgtctatatcaaagaagccttcgatacgggcgtgcgttacgactttaaaggcaactttgaccttgagggattagaacgcggtattgaagaagttggtccgaataacgtgccgtatatcgttgcaaccatcaccagtaactctgcaggtggtcagccggttagtctggcaaacttaaaagcgatgtacagcatcgcgaagaaatacgatattccggtggtaatggactccgcgcgctttgctgaaaacgcctatttcatcaagcagcgtgaagcagaatacaaagactggaccatcgagcagatcacccgcgaaacctacaaatatgccgatatgctggcgatgtccgccaagaaagatgcgatggtgccgatgggcggcctgctgtgcatgaaagacgacagcttctttgatgtgtacaccgagtgcagaaccctttgcgtggtgcaggaaggcttcccgacatatggcggcctggaaggcggcgcgatggagcgtctggcggtaggtctgtatgacggcatgaatctcgactggctggcttatcgtatcgcgcaggtacagtatctggtcgatggtctggaagagattggcgttgtctgccagcaggcgggcggtcacgcggcattcgttgatgccggtaaactgttgccgcatatcccggcagaccagttcccggcacaggcgctggcctgcgagctgtataaagtcgccggtatccgtgcggtagaaattggctctttcctgttaggccgcgatccgaaaaccggtaaacaactgccatgcccggctgaactgctgcgtttaaccattccgcgcgcaacatatactcaaacacatatggacttcattattgaagcctttaaacatgtgaaagagaacgcggcgaatattaaaggattaacctttacgtacgaaccgaaagtattgcgtcacttcaccgcaaaacttaaagaagtttaattaatactacagagtggctataaggatgttagccactctcttaccctacatcctcaataacaaaaatagccttcctctaaaggtggcatcatgactgatcaagctgaaaaaaagcactctgcattttggggtgttatggttatagcaggtacagtaattggtggaggtatgtttgctttacctgttgatcttgccggtgcctggtttttctggggtgcctttatccttatcattgcctggtttagtatgcttcattccgggttattgttattagaagcaaatttaaattatcccgtcggctccagttttaacaccatcaccaaagatttaatcggtaacacctggaacattatcagcggtattaccgttgccttcgttctctatatcctcacttatgcctatatctctgctaatggtgcgatcattagtgaaacgataagtatgaatttgggttatcacgctaatccacgtattgtcgggatctgcacagccattttcgttgccagcgtattgtggttaagtagcttagccgccagtcgtattaccagtttgttcctcgggctgaagattatctcctttgtgatcgtgtttggttcttttttcttccaggtcgattactccattctgcgcgacgccaccagctccactgcgggaacgtcttacttcccgtatatctttatggctttgccggtgtgtctggcgagttttggtttccacggcaatattcccagcctgattatttgctatggaaaacgcaaagataagttaatcaaaagcgtggtatttggtagcctgctggcgctggtgatttatctcttctggctctattgcaccatggggaatattccgcgagaaagctttaaggcgattatctccagtggcggcaacgttgatagcctggtgaaaagcttcctcggcaccaaacagcacggcattatcgagttttgcctgctggtgttctctaacttagctgttgccagtagcttctttggtgtcacgctggggttgttcgattatctggcggacctgtttaagattgataactcccacggcgggcgtttcaaaaccgtgctgttaaccttcctgccacctgcgttgttgtatctgatcttcccgaacggctttatttacgggatcggcggtgccgggctgtgcgccaccatctgggcggtcattattcccgcagtgcttgcaatcaaagctcgcaagaagtttcccaatcagatgttcacggtctggggcggcaatcttattccggcgattgtcattctctttggtataaccgtgattttgtgctggttcggcaacgtctttaacgtgttacctaaatttggctaaatccttcaagaagccagccattcgctggcttcttgcctctcaggaaatcacttatgtccaaatggcaactcgcctgatcctccttcaccacgtatgctttgcgtcaccttactatcaggacgctttagcccatgtcccgctttttgatttgtagttttgccctggttttactttatcccgccgggattgatatgtacctcgttggtttaccgcgcatcgccgccgatctcaatgccagcgaagcgcagttgcatattgcgttctccgtatatctggcggggatggcagctgcgatgttatttgccggtaaagtggccgatcgtagtgggagaaagccggtcgccatacccggcgcggcgctatttattattgccagcgtgttctgtagtctggctgaaaccagcacgttatttcttgcaggccgatttctacaggggttgggcgcaggctgttgttacgtagtggcgttcgctattttgcgcgacacgctggatgatcgacgtcgggctaaagtgctgagtttactcaacggtattacctgcatcattccggtgttagcgccagtgctcggacatctgattatgcttaaattcccgtggcagagtctgttctgggcgatggcaatgatgggcatcgcggtactgatgttgtctttgtttattttaaaagaaacgcgcccagcggcccccgcagctagcgataaaccacgagaaaatagcgagagcctgcttaaccgttttttcctcagccgtgttgttatcaccaccctcagcgttagcgtgatcctcactttcgtcaacacgagtccggtattgctgatggaaatcatggggtttgagcgcggtgaatacgccaccattatggcgctgaccgctggcgtcagcatgaccgttagtttctccacgccatttgcgctgggaatttttaagccacgtacgttgatgatcaccagccaggtgttattcctggcggcggggatcactcttgccgttagtccttcccatgcggtttctctgtttggtatcacgctgatttgcgccggtttcagcgtaggttttggtgtggcgatgagtcaggcgttagggccgtttagtttacgcgcgggcgtagccagcagcaccttaggtattgcgcaggtttgcggtagcagtctgtggatttggctggcagcggtggttggtatcggcgcatggaatatgctgatcgggattctgattgcctgtagcatagtgagcctgttgctgattatgttcgtcgcgcctggacgccccgttgccgctcatgaagaaatccatcaccacgcttgatctcaatctgctgctttgtctgcaactgctgatgcaggagcgcagcgtaaccaaagcggcgaagcggataaacgtgacacctagcgcggtgagtaagagcctggcaaagttaagagcgtggtttgacgacccgctctttgtgaacagtccgctgggtctgagccccacaccgctgatggtcagcatggagcaaaatctggcggagtggatgcaaatgagcaacctgctgctggataaaccgcaccaccagacaccgcgcggcctgaagtttgagctggcggcggaaagtccgctgatgatgatcatgcttaatgcgctgagcaaacagatctaccaacgttacccgcaggcgaccatcaaattacgtaactgggattacgattccttagatgccattactcgtggtgaagtggatatcggtttttccggtcgcgaaagccatcctcgcagccgggagctgttaagcagcctaccgttagccattgattatgaagtgctgtttagtgatgtgccctgcgtctggttacgcaaagatcatccggcactgcatcaaacgtggaatctggacaccttcttacgttatccgcatatcagcatttgctgggaacagagcgatacctgggcgctggacaatgtgttacaggagctgggacgcgaacgcacgattgctatgagcctgccggaattcgagcagagtctgtttatggcagcgcaacccgacaatctgctactggcgaccgcgccgcgctactgtcagtactacaatcaactccatcaactgccgttggttgctcttcctctcccgtttgacgaaagccagcaaaaaaagctggaagttccttttaccctgctgtggcataaacggaacagccataatccgaagatcgtctggttacgggaaaccattaaaaacctttacgcgagcatggcataaccgaatcgtatgaaacgcgacccaatttcacaataaaatgtaaaaaagttgtaataagcttgtctgaatcgaacttttagccgctttagtctgtccatcattccagtaaatgattactcttgtattcataatggaccattaagcatggagcgaaaaatggcgactcactttgcccgagggattttaacggaaggacatctgatttctgttcgtctcccctcccagtgtcatcaagaagcccgaaacattccccctcatcgtcaaagccgttttctggcgtccagaggtttactcgcagaactgatgttcatgctgtatggcattggcgaattgccggaaatcgtcaccctgccgaaaggtaaaccggttttcagtgataaaaatttgcctagcttttccatttcctatgccgggaatatggttggcgtggcgttaacaaccgaaggtgaatgtggcctcgatatggaactacagcgtgcgacgcgcgggtttcatagcccacacgcgcccgataaccacaccttttccagcaatgaaagcctatggatcagtaaacaaaacgatcctaacgaagcgcgggcgcagctcatcacgctgcgccgaagcgtgctaaaactaaccggtgatgttttgaatgacgatccgcgcgatctgcagctgctgcccattgccggacgcctgaaatgtgctcatgtaaatcatgtagaagcgttatgcgacgcggaagacgtgctggtgtggtccgtggcggtcacgcccacgattgaaaagctcagtgtctgggagttagatggcaaacacggctggaaaagcctgccggatattcacagccgcgccaacaatcctaccagccggatgatgcgttttgcccaactctctaccgtgaaggcttttagcccaaattgatagacaaccacaggagtcatcatgtctgaaaaattgcaggtggttacgttactggggagcctgcgcaaaggcagttttaatggcatggttgcacgtaccctgccgaaaattgctccggcgagcatggaagtcaatgcgttaccatccattgccgacattcccttgtatgacgctgacgtacagcaggaagaaggttttccagcaacggttgaagctctggcggaacagatccgtcaggctgacggtgtggtgatcgtcacgccggaatataactacagcgtaccgggtgggctgaaaaatgccatcgactggctttcccgcctgccggatcaaccgctggccggtaaaccggtattgattcagaccagcagtatgggcgtgattggcggcgcgcgctgtcagtatcacctgcgccagattctggttttcctcgatgcaatggtgatgaacaagccggaatttatgggcggcgtgattcagaacaaagttgatccgcaaaccggagaagtgattgatcagggtacgctggaccacctgaccgggcaattgaccgcatttggtgagtttattcagcgagttaagatctaaataaaaaacccgccagcaatcatgcatggcgggtttttaacgcgctatcgattttagtgagcgtcgataaagacaatcttcaggataaacagcagcgcaacgatgattacgcacgggcttagatcacgcagacgtccggtaccgattttcatcacgcagtaggagataaagcccagcgcgataccttcggtaatgctgaagctgaacggcatcatcacggcggtaataaacgccggaacagattcagtaagatcctgccagttcacgcgtgccagactggaagtcatcagcacgccaacgtaaatcagcgcaccagctgcagcgtagcctggcaccatccccgccagcgggctcagaaagataaccagcaggaacagcagaccaacaaccactgccgtcagaccggtacgaccgccaacgcttacgccggaagaggactcaatataagccgtaacggaagaagtaccgataaagctaccggtcacggaagagatactgtcgacatacagcgcctgcttcatgcgcgggaatttccccttctcatccgccagacctgctttatcggtcacgccaatcagcgtaccggaggagtcaaacaagttgaccaacatgaaagagaaaatcacccctgccagcccgaggttaaagctcccggctaaatctacatgacccacaactgtcattacgctcggcggcgcagaaacgatgccattgtagtgcacatcacccagcatccagcccagcagcgtcgtcaccacgatagaaaccagcaccgctgcgtgaatgttgcggctggccagaatagcaatgatgaagaagccgaggatacccagaagtacgctgtgagaagtcagattaccgatgctcaccagcgtttccgggttagcgacaatcacacctgcgtttttcagccccatcatgccaatgaacagaccgataccgctggtaatacccacacgcagactcaccggaatgttggctatcatccagtagcgaacgcggaaaatcgtcagtaacagcagacctatcgcgccccagaagattgcgcccatcccgacctgccacggcaagcccatcgcctgtacaacgacaaaagcgaagaacgcattcaggcccatagcgggtgccagtgcaactggcaggttagcaaacagtcccatcataatactgccgaatgcagcgatcagacaggtagtgacgaagacggcgctggtatccatgccagcaacgccaagaatttgcgggttaacaaaaacgatgtaaaccatcgtcaggaaggtggtaaaaccggcgatcacttcggtccgtgccgtcgtgccatgttcgcgcagtttaaacacgcgttccagcatcccctgaccagaagtctgggtggtatgttgatgactcattatctatttccgaacaaggagggaaaatccgtcgctatcgtataccaaaatgcgacaataggcgcgtttgtgagagacttttttattggatttacttatacggcaacgattgcgttgcgcaaatcggctctacgaaaacgttaaactgattaaaaaggaaaggcatgtcccggatagaagcggtatttttcgactgcgacggtacgctggtcgacagtgaagtcatttgctctcgcgcatatgtaacgatgtttcaggaatttggtattacgctcgatcctgaagaggtattcaaacgtttcaaaggtgtaaaactgtacgaaattatcgatattgtttcccttgaacatggtgttacgttagcgaaaacagaagctgaacacgtttaccgtgcagaagtcgctcggctgttcgatagtgaactggaagccatcgaaggggctggagcgctcctgagtgcgatcactgcgccaatgtgtgtggtatctaacggcccaaataacaaaatgcagcattctatgggcaagctgaatatgttgcactacttcccggataaactgttcagcggctacgatattcagcgctggaagccagacccggcgttaatgttccatgcggcaaaagcgatgaatgtaaatgtagaaaactgcattctggttgatgacagtgttgccggtgcacaatctggtatcgacgcaggtatggaagtgttctacttctgcgccgacccgcacaataagccgatcgttcacccgaaagtcaccacctttacccatcttagccagttacctgaactgtggaaagcgcgtggttgggatattacggcataattcttcacactcccttcacttaccccgcttaaattggcgctcaaaggtaagtaaagggagtttgatatgtctgttagtcgtcgggtaatacatcacggactttattttgcagttttaggaccgttaattggtgttctgtttcttgtcctctacatattcttcgcaaaagaaccgctggttctttgggtgataatacatccaatttttctcttattgagcataactacgggagctattcctgcgttgttaaccggtgtaatggttgcctgtctgccggaaaagatcgggagtcagaaacgttatcgttgtctggctggtggcataggtggcgtcgttatcaccgagatctattgtgcagttattgtacatattaagggcatggcttccagcgagttgtttgaaaacattctttctggtgacagtctcgttgtccgcatcattcctgcattgctggcaggtgtggtgatgagcagaatcattacccgtctacccggattggatattagttgtcctgaaacagactctttaagttaagcgggatactttatctttgggctactcaaaagcagacaggatgtttctatgactcaaaatatcaggccgttaccccaattcaaatatcatcccaagccactggaaacaggcgcatttgaacaggataaaaccgtagagtgcgattgctgtgaacaacagacgagtgtttattacagcggtcccttttattgcgttgatgaagttgaacatctctgtccgtggtgtattgcggacggttctgctgctgaaaagtttgcaggtagttttcaggatgatgccagcatagaaggtgttgaatttgagtatgatgaagaggacgaatttgccggtattaagaacacatatcctgatgaaatgctgaaagagttggttgaacgcacgccaggttatcatggatggcagcaggaattctggctcgcgcattgtggcgatttctgtgtttttatcggctatgtgggctggaatgatataaaagatcgcctcgatgaatttgccaaccttgaagaagattgtgagaatttcggtattagaaattctgatctagctaaatgcctgcaaaagggtggtcattgtcagggttatctcttccgctgtctccactgcggcaagctgagactgtggggtgattttagctaattatttaaataatgagaacaggccggagcgtaattcacacatccggccttatttcttaagcttaaccgagtgctaattctgcggcagcggctttatcagcgattaccatcaggctaggatgcagctgcaacacggaagctggaacatcttcggtaaccggaccttgcagaacatttttcagtgcctgcgctttacccgcgccgctgacaattatcagcaagtttttcgccgccatgatgcttttcggccccatcgtcacgtagctgtcaggcactaagctaaagtcgccgcccaactcgccatgcgccacaatatcaaccatctctccctggatcgggaactccacggtttgctcatggaaatgggtcgtattcggcaaattgccacaaaaatgaccatctgcacctaatcccagcaccaccaaatccagtccgccttcacgcgccagtttctgatcatgctcgcggtagttatcaatagtgagcttctggatattctcttctttgatccccgcaggggtgaaaaacagattacgcagattggtaatcgttacgccttctccctctttgccgcgaaatggaatttcatcaaaattatagaaatagcagttatcgtaccagggcttacctttaaccagggtggtgaggtattcatacatgcctttgggcgtgctaccggcggtaattgccaggttaacacgacgcgtcttgctcatataaccaagcagatggtgtgccgcgacacggctcatttcctggtaatcttcggtaatgattaatttcatcttaatgccttattttatttaaataatttctgtacaaaggctgcataggctggtcgccagacatccatttcatggttcagacccggatattcctggtaatcaaagttaatttttttctgctcaagctcagttttcagcccggcgatatccttgccggttacgacatctttatcccccacaaccacagtaaaattacgtagttgctggttgatagctgccggatcgttcagtcgggccgcgacaccttcatccggtacggttgtcgtggtaacaccactgaatgtggccagccagccaaagctttccagatgattcattccggaaaccagcgcctggtacccgccttgactaagccctgccagcgcgcggccatcggcatctttacggacattaaaacgcttgctaatcagcgggataatatcgttcatcagttcgcgatctgccgctttagcattcagcggataaaagactttacgtctttcctgaggcacgaaatcttcgggaataatgcccttcgcatcggtttctgtatccgggatcaccaccagcatcggtttaattttcccttcagcaagcaggttatccatgatttgcgggatacgcccctgatcgatagcggaacgtccggtatcaccaaagccgtgatagaaatagagcactggcaaaggctcgcccatgccggtgtatcctggcggggtccagacatacatctgacgttcagattgcaatgcgttggagtggtaagttatggcgatcaaatcaccatgcgcaacagaacgcgtatccagataactgcctggcaccagaatcatactggagttaacctggcgctgaggattagtcattgcggtgcctgtatcaatgctgcgtacaccatcaacattgaaaaaatactcgtacaggttgcctttcaggataggtgtgcgccagctccagactcctgcttcgtctttggtcatcgggtgaatattgtccggaaccggaacacccaccactacagagacattttttgccccaggggcaaagtagcgaaaggtcacgctgttatcggcattgacctgagtcacatactgtttcaccgggatagtgggtgccgggctggctggcatatccgctgctatggcccactgagcagaaataccgctggcaatagccagcgttaaagcagcaatttttatattcatcgtaatattcctttcattaagttccattaccaccagatttcagcctgggcaccgacagcaaactggtcgtctttattgtcttcaaaggtgaagccatccagttcgttttccagggctttgatatacgtggcgtagaaacgaatttccggacggctggtcaacatactggtattgactttaaaggtatggaagagcgtggttttataaccagactcattaaatttattactattcgcatctttgttttgctgggtgaaatagcccagttcaacacctgtctggttatattggtcccaaatataggccgggcgaacaaccgcacgaatagattcgaaatcagagtgggcgcctgtttcgtagctatatatatcgttaccgaaggagtaaacaatcgcgttagctacaatgaaatgatcgccaatataggcttcgccctggctagtcagacgtaccgctgttccgccggtgtgatcaccataataacgaccattaaaggtggtaaatggacttgcgccagcataacggccaaagttactggcgatagagttattcgcgaccaggaaggagaattcgttgaagccacctttatcaaatttctgcgttaaagatgtgccaaacatccaggtatctttccagtcataatacccgttattatcctgattatctttttcgcttgcgctttcgtttgccgtgacataacgaccacttaccattaaggtggctttatcccataacgggatatctttatagcgtaaatcaatggtattggtattaatctgctgtttgttttgcaggctgcgatcgtaatcatcgacatcttcgcgaaccagcgcgatatcaattttacccggaccgactttccagttttccagacctacacccgctgcggcatcagtacgctgcgttttccagtcaagcatctggatttcaattttcggcgcaccgtgtttacccacccagaaatcagcctctggcgcaaagggcaggaaacctttggtggtaacgtacatatcggagaactgcatatagttctcgccaccggcgttatcgccaaaccagccggtagagtactgctgaccaacgttaccatccatcatcacaacggcatcaacccgtttgccgttttcgttgtagacacgttgttttaactgcaaatcaaaccagccggagtattcgttaccaaagcggcccagagaaccaatcgcccaacttttaggactaccatgagaggcggtcccccaaccagaacggtaatagccgttgtaactaaagccaatttcatctttcacaaatttactgaaatctttcagagtcatggaagaataaatgctgcctgtctcactggcatttttctcttcatttttgaccagtacagcatcaggttttgcggcactactggtcgggaacggattggcggcatacccttgatcattcgtacttacgctacgattcaccgtcgctggcgtatactttttcttctcttcatctttatactttttgagttcgctttgcgtttctcttaacgccttttctaataactcaaggcgttgttccaccgttaaactttcagccaaactttgtgcagaaaaggctaacggtgccattaataagatggcagaggtaataagatttcgtctaaacataatatccctttatggtgcaaagaaagaattaacgcatcgcatccagactgttctgaatgcgacgataattaaggtgctttaatggttattttttttaaactcagcccccgcgtcttgatcacctctgcataccatccgaagcttttcttgcgtgttcttgtgaggcttccttcgccattatcatcacgatccacataaataaagccgtagcgcttagacatttgactatgagatgcactgactaaatcaattggcccccaactggtgtaccccataatatccacaccatcggcaatcgcttcatttacctgtaccaggtgatcgtttaaataggcaattcgataatcgtcctgtatgctaccatccgcttcaacgctgtcttttgcgcctaatccgttctcgacaataaataacggtttttgataacgatcccaaagcgtatttaacagaacccgtaatccaaccggatcaatttgccacccccactcactacttttcagatgcggattggggatcatattcagtatgttgccctgcgcatttttattaatgctttcgtcgtgggaaacacaaccagtcatgtaataactaaaagagatgaaatcgacggtatgttttaaatcttctgcgtcactttcagtcatctcaatggtgatattgtggtcgcggaagaaacgctgcatatagccgggatactggccacgcgcctgaacatcaccaaagaacatccagcgccggttctcttccatggcctgcaacatatcctgtggctggcaggtgagggggtaaaccagcccaccgagaagcatattgccgattttcgcttcggggagcaggctatgacaggctttaactgcccgcgcactggcaaccagttgatggtggatagcctgataaacttccgcctcgccactctcttctgccagccccacgcccgtgaatggcgcgtgtaagctcatgttgatttcattaaacgtcagccataacgccactttatgttggtagcgagtaaagaccgtgcgggcgtaatgctcgaagtgatcgatgaccgctcgattagcccaaccgccgtagtttttcaccagcccatatggcatttcgtaatgggataacgttaccagcggcttgatccccgcctgcgccatttcatcaaacagccgatcgtaaaacgctaaccccgcttcattcggttcgacttcgtcgccctgagggaaaattcgcgcccaggcaatggaaatacgcagacaggtgaagcccatctcggcaaataacgcgatatcttccgggtaacggtgataaaaatcgatggcgacatctttgatattctctttccccaggatgcgcggttccatttttcccattacgccatgaggctgtaaatcactggtgctgatccctttgccatcttcctgccaggcaccttccacctgattggcagctgttgcgccaccccaaagaaatgtttctggaaatgctttcataattaactccttttatcgttagcgaatgatggataacagcggttcacctgcgcttatctgcgccgtgccgtggggtaatacgtccgtaaaatcatcgctattactgattaataccggcgtcgtcagatcaaatccggcctcgcgaatagcagggatatcaaaagaaatcagccgatcgcctgtattgaccttgtcacccacgttgacgtgagcggaaaagaatttgccgtccagttttacggtgtcgataccgacatgaatcaggatctccacaccatcatcactctcaatgccaatggcgtgtaatgtggcgaacaagctagcaattcgacccgcaaccggagaacgcacttcaccaacgctgggcagaatggcaatacctttacccaacaggccactggcaaacgtggtatcagcgacgtgaatgagcggcacaatctctcccgtcatcggactacagataccgccctgctcaggtggtgtaataacctctggtgttttctcttgcggggcaccctgcgctggctgacgtttagcggtgatgaaatgaagcatcaccgtaccgacaaatgcgcaaccgatggcaatgacaccgccaataacgctggcccagacggtgaaatcaattcccgtactcgggatggtttgcatgaaggtgaaaatacttggcaaaccaaaggagtagactttcgtttgcgcgtagccaataatggtggccccccaaagccccactgatacaggcgataacaaaggggtacttacgcggcaggttgacgccatataccgctggttcggtgataccaaacagactcgtcaacgccgcacttcccgccaccacttttttctgcgcatcgcgttcgcagaggaagacgccgagcgccgccccgacctgcgccataatggcgggcattaacagcgggatcatggtgtcgtagcccagcacggtgaagttattgatacacagcggcaccaggccccagtgcagtccgaacatgacgaagatttgccagaagccgcccattaccgcgcccgcaaatgcaggaaccgcctgataaagccagagataaccggcggcaatcagttcgcttatccaggtacttagcggccccaccagcagaaaggtgacgggtgtgataaccatcagacatagcaatggtgtgaagaaatttttgattgcgctcggtaaccacgcattaagtcggcgttccagaatgctgcacaaccaggcagaaaaaataatgggaataacgctactgctgtaattcaacaatgtgaccggaatacccaggaaatccagccccagcgcatccgctttttgcccgttctcgaaagcagtcagaattaatggatgcactaacgctccaccaatcaccatggcagtaaatggattaccgccgaagcgtttccccgcggtgtatcccaggattatcgggaagaaccaaaacaaggcatcactggcgctgaataaaattaaataagtaccactttgttcggtcgtccactgaaaagtgagcgccagagccagcatacctttcaagatcccggttgccgccatcaaaccgatcagaggcgtaaaaataccactaataacataaacaaagcggtttagcagattacctttatcatcattttccggtgcctgttgcgctttttcgtcaaggcctgccacactgttaaccgccaggaagacatcggccacatggttacctatgaccacctgaaactggccaccgctttccaccaccataataataccgggggtctttttcagtacctctgcttgcgctttgctttcatcctttaatttaaaacgtaatcgcgttgcgcaatgcatcagactcacaatgttatctgcgcccccgactcctgcgactatttttctggctaactccgtcataacttgccctctaccgctttgcggcaaaactccaaaaaaaaacctgaaaaaaacggcctgacgtgaatcaagcaatttttttcaggttttgcccgcttagtgcggtaacaatcctttactcagtaataatatttcagtgttctttgcgcacgcgctctatatttatggctaaaaacataatctctgcgggactaattttacgttgatactgcaaaccaataaaaatggcgatccgttccgcacattgccatgcttgcgggtaattttgttttactgcttgttgtaaactttcatcactatcgttaatactagcatgttcaagaatacgccaggataaaaacttcagatgtgtaaccagtcgctgataactcaagctttcttcctggtaattaaggctgaactgaaattttattaattgcagcatttcgcgcattaactgcgtgacacctgcaacatcctccatatttccgctcatttgggcactgaccagatgcatggcaataaagcccacttcatctttcggtaactgcacgcccaaccgtttatcaataatggttaacgcttcttcccctagctggaactctttcgggtaaagccgctggatatcccacagcaacgggttgggcagcaacacgttttgctgaaagcgtttaatcgcaaactggcaatggtcagttaggctgatataaatactgtcctgtaattttcccaagcgctcctgcgctaaagagataatacgatcacaggttgccatcacctcaagaggaatatgacttaagagttcgcttaatcgcccgttcagttcatgactgctcaaggcatactctttttctattccactactgttaattctttcgccagcgcgtttttgaaagccaattccgcgccccatgacgactttttcccgctgttgatcatcaataaccaccacaacattattgttgagaattttggtgatttgcatgttcatagcaaggaccttttttataaacaaaaaaacccgacttcaccagtattctctggttatgtcaggttttgcctgcgaatgcagtaacaatccagtcatttattaatggtttttataacgaacatccaggttcggaaattaatttaattgcgtgcagagaaaatagcaatgcgctattgataaaaatatgaccatgctcgcagttattaactttgtgtaattttaggaatttataaagttatatataacaaatcccaataattaagttattgggatttgtctggtgaattatttgtcgctatctttccccgccagcagtttatccagctcatcgccaccgacgtgacggaaatcctgccccttcacgtagtagaagataaactcacaaatattctggcagcggtcgccaatacgttcgatagaacgcgcgcagaacagcgcagtaagtacgctcggaatggtacggctatcttccatcatgtaggtcatcagttgacgaacaataccttcgtattcctgatcgacttttttatcttcacgataaatacgtaccgcttcgtcaatgtccatccgcgcgaacgcgtccagcacgtcgtgcagcatctggatggtatgacggcccaggctctccagacttaccagcaacggctgatgctgctgggagaatttctccagcgcagtacggcagattttgtccgccacgtcgccaatacgctccagctcggcaatggttttactgatcaccataaccagtcgcaggtcgctcgccgtcggctgacgtttggcgataatgcgcacgcaggcttcatcgatcgccacttccatcatgttgacgttcttgtcgccttcgatgacgcgcttcgccagatcgctgtcctggttatgcatcgcggtgattgcatcagaaagctgctgctccaccatgccgcccatggtcatcacctgcgtgcggatactttccagttcggcgttgaactggccggaaatatgtttattaagattgagactgtccataacgcactcctgaatcaaccgtaacgaccggtgatgtagtcttctgtttgtttcttcgctggcttggtgaacagatcgtccgtgttgctgaactcaatcaattcgcccaggtacataaacgccgtgtggtcggaacaacgcgcagcctgctgcatgttgtgggtgacgatcaccacggtgtaatcctgcttcagttcggtgatcagctcttcaatacgcccggtagagatagggtcgagcgcgctacacggttcgtcgagcagcagcacttccgggcgaatggcgataccacgcgcaatacacagacgctgttgctgaccaccagagagagagtaaccgctctggtgcaatttatctttggtttcgttccacaatgcggctttggtcaatgcccactgcacgcgctcgtccatgtcggcacgggagagcttctcaaacagacgaacgccaaaagcgatgttgtcgtagatggacatcggaaacggcgtcggtttctggaacaccatgcccactttcgcacgcagcagtgcgatatcctgagagttggtcaggatgttgtcgccatcaagcagaatttcaccttccgcacgctgctccgggtacagttcaaacattttgttgaaggtacgcagcagcgtgcttttaccgcagccggacggcccgataaacgccgttacctggtttttagcgatatccaggttgatgtttttcagggcatggaatttgccgtagtagaagttcaaattacgaacctgaattttactcggggcagtttcaaccatactcattgcaatcttttcctcatcgtgcctgatgcacttcgctaatcaggcttaccgtaggccggatcaggcgttcacgccgcatccggcaaagtgttaaccgtgtacagagtcaaaaaggcgctcggtcggtcccctcgcccctctggggagagggttagggtgaggggaaaaccgtgtcagcaatatcaaccgtgtttattcttcgcaaaaacaacgcgcgccagaatgttcagcagcagtacgcacagggtaatgatcaataccccggcccaggccaattgctgccattccgcaaacgggctcatcgcaaacttaaagatcgtcaccggcaggttggcgatcggctgcatcatgtccgtgctccagaactggttggagagcgcggtaaacagcagcggcgcggtttcaccagcaatacgggcaatcgccagcaggataccggtcataatcccggacacgctcgctttcagcgtaatcgcagagatcatcttccacttcggtgtacccagcgcataagccgcttcacgcaggctgtacggcaccagtttcagcatgttctcggtggtgcggataacaatcggcacctgcaacaacgccagggcaatcacgcccgcccagccggagaagtgctccatctgcgccaccacaatggtgtaaacaaacagaccaaccacaatgctcggcgcagagagcagaatgtcgttaatgaagcgaatcacttctgccagccaggatttacgaccatattccgccagataaatccccgccataatgcccagcggcgtaccgaataccgtggcccacaaaattaacagcccgctacccgccagagcgttcgccagaccaccaccttccgtattgggcggcggcgtcatttcagtgaacagcgccaggctcataccgtcgataccgcgagtgatggtggacattaaaatccagatcagccagaacaggccgaaggccatcgtcgccatgctgagcgtcagcgcaatacggtttttgaggcggcgacgcgcctgcattttgcggcgagattcagccagcgccgcagtggtttgcatttcaaccatagccattagcgtgccccctcattcttagccaggcgcataatcataaacttgcttgcggcgaggacgatgaaggtaatcacaaacaggatcaggcccagttccatcagtgcggcaacgtgcagaccggattccgcttccgcaaattcgttcgccagcgcagaggtgatactgttgcccggcatatacaggctggcgctgtcgagctggtaggtgttaccgatgataaaggtcaccgccatggtttcaccgagcgcgcggcccagccccagcatgatgccgccgataacaccatttttggtgaacggaagaacgatacgccagataacttcccaggtggtgcagccaataccgtaggcgctctctttcatcatcaccggggtttgttcgaacacatcacgcattaccgccgcaatgtacggaataatcatgatggcgaggatcacgcctgccgcgaggataccgataccaaatgcggggccagagaacagcgcgccaacaatcgggatattgctcatgatattgccgaccggctcctgaaagtaaacggcgaacagcggcgcaaagataaacaggccccacatgccgtaaacgatacttggaatggctgccagcagctcaatggcgatacccagcgggcgtttcagccagccaggcgcaagctcagtcaggaacagggcgataccgaaactcaccgggacggcgatcagcagcgcgataaagctagtcaccaacgtaccgtagatcggcaccagcgccccgtagatatcgttcggtgcatcccactctttggtccataggaaagccagaccaaatttctgaatgctcggccaggaggagatgatcagagagacaataatgccacccaacatcaatagcacaatcagcgccgccagttttaccagcacgctgaaaattatgtcgccctttttacccggtgggttaaaagcaggcttggttgcagccataagttactcttcagttaaacgcgtttacaaagtcattttgtaatgccggatgcggcgtaaaacaccgtacccggcctggagttttattagtacagcggcttaccgctactgtctttaatattggtcttccacgcagcgcgaacctgttcaactacactatccggcaggctggcgtaatccaggtcgttcgcctgtttagccccggttttgtacgcccagtcgaagaatttcagcacttctgtgccttgttctggtttcttctgatctttgtggatcagaatgaacgtggtagaggtaataggccatgcatcttcgcctttctggttggtcagatcctgagcgaaggttttgctccagtctgcaccttttgctgcattagcgaagttttcttcggtcggactaaccggtttaccatcagcggagatcagtttggtgtacgccaggttgttctgcttcgcgtaagcatattcaacataaccaattgcacccggcagacgctgaacgaacgcggcgataccgtcgttacctttaccgcccagaccgatcggccattttacggtagagccagtaccaacgttgtttttccactcttcgttcactttcgccaggtagctggtgaagacgaaggaagtcccggagccatctgcgcggcgtactacagcaatgttttgactaggcagtttcagacccggattcagtttggcgatggcttcatcatcccacttcttgattttgcccaggtagatgtcgccgagggttttaccatccagcaccagttcgccagacttcagccctggaatgttaaccgccagcaccacgccgccaatcacggtcgggaactggaacagaccttcctgagccagtttttcgtcagacagcggcgcgtcagaggcaccaaaatcaacggtattagcgataatctgttttacgccaccggaagaaccgataccctggtagttaactttattaccggtttctttctggtaagtgtcagcccatttggcatacaccggcgcagggaaggttgcacctgcacctgtcaggcttgcttctgcaaacacagagaaagcactcatgcttaaggtcgcggcgacaacagttgcgacggtggtacgcataactttcataatgtctcctgggaggattcataaagcattgtttgttggctacgagaagcaaaataggacaaacaggtgacagttatatgtaaggaatatgacagttttatgacagagagataaagtcttcagtctgatttaaataagcgttgatattcagtcaattacaaacattaataacgaagagatgacagaaaaattttcattctgtgacagagaaaaagtagccgaagatgacggtttgtcacatggagttggcaggatgtttgattaaaaacataacaggaagaaaaatgccccgcttacgcagggcatccatttattactcaaccgtaacgctttttgccaggttacgcggctggtcaacgtcggtgcctttgatcagcgcgacatggtaagccagcagctgcagcggaacggtgtagaagatcggtgcaatcacctcttccacatgcggcatctcgatgatgtgcatgttatcgctacttacaaaacccgcatcctgatcggcgaagacatacaactgaccgccacgcgcgcgaacttcttcaatgttggatttcagtttttccagcaattcgttgttcggtgcaacaacaataaccggcatatcggcatcaattagcgccagcggaccgtgtttcagttcgccagcagcgtaggcttcagcgtgaatgtaagagatctctttcaacttcaatgcgccttccagcgcgattgggtactgatcgccacggcccaggaacagcgcgtgatgtttgtcagagaaatcttctgccagcgcttcaatgcgtttgtcctgagacagcatctgctcaatacggctcggcagcgcctgcagaccatgcacgatgtcatgttcaatggaggcatccagacctttcaggcgagacagcttcgccaccagcatcaacagcacagttaactgagtggtgaatgctttagtggatgccacgccgatttctgtacccgcgttggtcattagcgccagatcggattcgcgcaccagagaagaacccggaacgttacagattgccagactaccaaggtaacccagctctttgctcagacgcaggccagccagggtatccgcggtttcgccagactgactcaaggtgatcatcaggctgttacgacgcacggcagatttgcgatagcggaattcagaggcgatttcgacgtcgcacggaatacctgctaggctttcaaaccagtagcgggaaaccataccggagttataagaagtaccacaggcgaggatctgaatatgctcaaccttgctcagcagttcgtcggcgttcggtcccagctcgcttaaatcaacctgaccgtggctgatgcgtccggtaagggtgtttttgatcgcgttcggctgttcgtagatctctttctgcatgtagtgacggtaaatgcctttatcgcccgcgtcatattgcagattggattcgatatcctgacgttttacttccgcgccagttttatcgaagatgtttacgctacggcgagtgatttccgcaatatcgccctcttcaaggaagataaagcgacgggtcaccggcaacagcgccagctggtcagaagcgataaagttttcgcccatccccaggccaatcaccagcggactaccagaacgtgccgccagcagggtatccgggtgacgggagtccatgatcactgtaccgtacgcaccacgcagctgcgggatagcacgcagaacggcctcacgcagagtcccgccttgtttcagctcccagttcaccagatgggcaatcacttcggtgtcggtttcagaaacgaaggtatagccacgcgcttttagctcttcacgcagcggttcatggttttcgatgatgccgttatgcaccaccacaatgtgttcagaaacatgcggatgcgcattcacttcactaggttcaccgtgggtcgcccagcgagtgtgagcaataccagtgccgccatgcagaggatgttcttccgctgcctgtgccagcatctggactttaccgaggcgacgcaggcgggtcatatgaccttctgcatcaacaacggccagaccggcagagtcatatccgcggtattccagacgacgtaaaccttcaagaaggatttctgctacatcacgttgcgcgatcgcgccaacaattccacacatagtttttgattccgatttatatcgttgtcggtcaacctgtatgcccgttttttcgggcgccccgagccttgtagagagtggggttatttttatagttactgcttgtgggagggagattatgttatctcctcatcccatgtgaccgggttagccggccagaatcactttttctttaccggacgacgccagccttctttctgagtctgcggcacacggctgatagctaatgcattttcgccgacattacgcgtcacagttgtacccgcagcaatggtcgcgcctttgcctactgttaccggggccaccagctgagtgtcggaaccaacaaacacatcgtcgccgataatggtcttaaatttattcgcaccatcgtagttgcaggtaatggttcccgcgccgatgttaacgttatcgccaatttccgcatcgcccaggtaagtcagatgaccagctttgctgcctttacccagacgcgcttttttcatctcaacgaagttaccgacgtgagcaccttccagcaactcagcaccaggacgcaaacgggcaaacgggccaatggtacaggccgctgccagattcgcatcttccacaacggtatacggactgatttcgcaatcatcgccaatcacgctgtttttaatcacgcaaccggtgccaattttcacgcgatgaccgagagtcacgttgccctcgatgataacgttagtatcaatttcaacatcgcgcccgtgagttagcgtaccacgcagatcaaaacgcgctggatcgcgcagcataacgcctgctaacagcagtttttcagcctgttcggactgataaacacgctccagacgggagagttgcaggcggttattcacgccttctacttcgcttaaacgttgcggatgaacggcgacgatttcacgcccttcctgatacgccagcgcaataatgtcggtgatgtagtattcgccctgagcattattgttggtcagcttcgccagccagcgtttcatatctgcgccgttggcaatcagaatgccggtgttgatctcctgaatctgacgctgctcgtcggtggcatctttgtgctcaacaatgccggtaactttgccgttttcacgggtgatacgtccataaccggtcggatcatccagtttcaccgtcagcagaccaatgccaccctgcggtttagcatcacgcagacgctggagtgtttcgacagagatcagcggcacgtcgccgtagagcattaaaatgtcttcatcatcggcaaagaaaggtgcggcctgctgcattgcatgacccgtacccagctgctctgcctgaagcacccagttaaggttgtcgtctttcagcgcctgttttagcagatcgccgccgtgaccgtacaccaggtgaacgtgcgctgcgcctaattcattcgcagcatcaatgacatgctgaaccatcgctttcccggcaagggtatgcagcactttcggaagatcggaatacatgcgcgtgcctttgcctgcggcaaggatcactacgctcatagcattattcaacatacgcgtcctgactgtaatttgagaacgaatttaaaccgcttcaccttgaaaaaactacatttttttcatcgtgaaatggacagaggataaattgttcaataacggattatccccgctgacgaaagcgccattttcgaccatcgtcacgccttttgtctgcagaaaattaaggcagtaccttaatttaagcgtcaggtggatgtttttgctcttatttcgatcaatgaataaacaggaaaacaggggggttttatatcagcaggatctatgtgaacgctattcaggacgggtcacacgcgcaaaaaaaagccagcctgtttccagactggcttttgtgcttttcaagccggtgttacatcgcttttttggtcaactcgataacgcgcagctgcgcgatcgctttggccagttccgcagacgcctgagcgtaatctacgtcgccgtgagagctgctaatgtgctcttcagccttacgtttcgcttccatggctcgcgcttcgtcgagatcctggccgcgaattgcggtgtcggccagaacggtcacgttgccaggctgcacttcaagaatgccgccagacagatagataaactcttcgtgaccgtgctgtttcacgatgcgaatcataccaggcttaatggcggtgagcagcggtgcgtggccagggtagatccccagttcaccttcgctacccgttacctggattttctcgaccagaccagagaacatttgttgctctgcgctgacgacgtccaggtggtaagtcattgccatatcaccctccgattaaggcgttaaagttttttggctttttccacagcttcttcgatggaaccgaccatgtagaacgcctgctccggcaggtgatcgtattcgccttccatgatgcctttaaagccacggatggtgtctttcagggagacgtatttacccggagaaccggtgaatacttctgccacgaagaacggctgggacaggaagcgctggatcttacgagcacgcgctaccaccagtttgtcttcttcagacagttcatccatacccaggatggcgatgatgtctttcagttcctgataacgttgcaggatggactgaacgccacgcgcggtgtcgtagtgttcctgaccaaccaccagcgggtccagctgacggctggtggagtccagcgggtcaacggccgggtagatacccagagacgcgatctgacggctcagtaccacggttgcgtcaaggtgcgcaaaggtggttgccggagacgggtcagtcaagtcatccgcaggtacgtatactgcctgtacggaggtgatagaaccagttttggtggaggtgatacgttcctgcagaacgcccatctcttccgccagggtcggctgataacctaccgcactaggcatacggcccagcagtgcggatacttccgtaccggccagggtgtaacgatagatgttgtcaacgaacagcagaacgtcacgaccttcgtcacggaatttctcagccatggtcagaccggtcagagcaacgcgcagacggtttcccggcggctcgttcatctggccatacaccagggatactttgtcgataacgttggagtcggtcatttcgtggtagaagtcgttaccctcacgagtacgttcacctacgcccgcaaacacagagtaaccggagtgctcgatcgcgatgttacgaatgagctccatcatgtttacggttttacctacacccgcaccaccgaacagaccaactttaccgcccttagcgaacggacacatcaggtcgataactttgataccggtttccagcagttcctgagagttactcagctcttcgtaggaaggtgctgcgcggtgaatcgcccaacgctcttcttcaccgatctcgcctttcatgtcgaccggttcacccagtacgttcatgatacggcccagagtcgctttacctaccgggacttcaatcgggtgttcgaggtcttttacatccagaccgcgacgcagaccgtcggaggaacccattgcgatggtacgtacgataccgccgccgagctgctgctgaacttccagcaccagacgctcattaccattttgcacctcaagagcatcgtacacgcgcggtacggcatcctgagggaattcgacgtcaactacggcgccgattacctggacaatctttccagtagccatcttaaatcctctacgaaataacctgtttaaaccgcggcggccccgctgacgatctcggtgagttcctgagtaatgctggcctgacgagctttgttgtataccaactgcagctctttaatcaggctgccgccattgtcggtcgcggctttcatcgccaccatacgggcggcctgctcgctggccaggttttcaaccacgccctgataaacctgagattcgacataacgacgcagcagggtatccagcaacgccttcggatcgggttcgtacaggtaatcccaggatttatgtttcagatcatcatcatcacttgccggtaacggcagcagctggctgatggtcggaacctgagacatggtgttaataaatttgttgctgacaatgtaaagcttgtccagacggccttcgtcgtaggcctgcaacatcacttttaccggaccgatcagttcggacagggaagggttatcccccatgccggtgacctgggcaacaacattgccgcccacggagttgaagaagctcacgcctttgctgccgatcattgcgaggtcgcattgaacgcctttgtcggtccaggtcttcatttccgccagcagttttttgaacaggttaatgttcaaaccaccgcacaaaccacggtcggtgctcaccaccaggtagcccacgcgtttaacgtcgcggtcttccaggtaagggtgcttatattccagattaccgtgtgcaaggtgaccaatcactttgcgcatggtttctgcataaggacggctggccgccatgcgatcctggcttttacgcattttggaagcggcgaccatctccatcgctttagtgatcttttgcgtgttctggacgcttgcgatcttactacgtatctcttttgcgccggccatgagcttctcctcaatgccttgcggcctgccctaaggcaagccgccagacgttaccaggattgggttgctttgaaggaatcgaggatgcctttcagcttgccttcgatttcgtcgttgtagccaccggtctggttgatctcttgcatcaacggagcgtgatcacggtcgacgtaagccagcagagcggcttcgaagctgccaattttgctcagttcaacatccgccaggtaaccacgttctgctgcgaacagaaccagagactgctgcgcaacggacatcggcgcatactgtttctgtttcagcagttcggtcactttctgaccgtggtcaagctgcttacgtgttgcatcgtcaaggtcggatgcaaactgagagaacgctgccagttcacgatactgtgccagagcggtacggataccaccggacagttttttcatgatcttggtctgtgctgcaccaccaacacgggatacggaaatacccgggttaaccgcaggacgaataccggcgttgaacaggttggtttccaggaagatctgaccatcggtaatggagattacgttggtcggaacgaacgcagaaacgtcacccgcctgagtttcgataatcggcagtgcggtcagagaaccggttttccctttcacttcacctttggtgaaggcttcaacgtattcggcgttaacacgtgcagcacgctccagcagacgagagtggaggtagaaaacgtcgcccgggaatgcttcacgtcctggcggacgacggagcagcagggagatctgacggtaagcaacagcctgtttagacaggtcatcgtaaatgatcagcgcatcttcaccgcggtcacggaagtattcgcccattgcgcaaccggcatacggtgccaggtattgcagtgcagcggattcagacgcggttgctaccacaacgatggtgttagccagtgcgccgtgctcttccagtttacgtaccacgttagaaatggtggacgctttctggccgatagcgacatagatacatttgataccggaatcgcgctggttgatgatggcatcgatagccagtgcggttttacctgtctgacggtcaccgatgatcaattcacgctgaccacgaccgattgggatcatggagtcaacggctttataaccggtctgtaccggctgatctacggactgacgttcgataacgcccggagcgattgcttctacagcagagaagccgtcgtgatccagcggacctttaccgtcgattggtgcacccagagtgttaaccacacggcccagcaggccacggccaaccggaacttccaggatacggccagtacacttaactttcatgccttcggcaaggtcagcgtacggacccataacaaccgcacctacagagtcgcgctcgaggttcagtgcgatagcgtaacggttacccggcagggagatcatttcaccctgcatacaatcggccaggccgtgaatgcggataacaccgtcacttacagaaacaatagtaccttcgttgtgagcttcactcacaacattgaactgagcaatgcgctgcttgatcagttcgctgatttcggtggaattcagttgcatgctccagtccccttaagactgcaagacgtctgcaaggcgctcaagacgaccgcgtacgctgccatcaatgaccatatcacccgctcggatgataacgcctgccattacagacttatcgattttgcaattcagcttaactttgcgactcagacgtttttccatcgcagcagaaattttcgcgagctgttgttcactcagtgcggcagcggaaatgacgtctacctcagcggtagcctcactcacggcacgcaggtgaataaactgctccagaacatccgggagcgcgttaagacgaccattttcagccataacccgaatcaggttctgaccgttttcgtccagttgctcaccacaaactgcgataaagctctcggcgagcgtttctggcgcaagcgcgccagagagaagctctgccatttgttcgtttttggttacctcggcggcaaacgccagcatgtcctgccagcgttctacactttggtgttcgacggcaaagtcaaaagctgctttggcgtaggggcgagctaccgtaataaattcagacatcagcccctccctccttacagttcagcgacaagtttatccacgatgtcgctgttagcagcttcatccacggaacgttcgatgatcttctcggcgccagcaacagccaggatagcaacttgcttacgcagctcttcacgggcacgtttacgctcggcttcaatttccgcctgcgcctgggccacgattttagtacgttcctgttctgcctcagctttcgcttcgtccagaatctggctgcggcgtttgttcgcctgctcgatgattacctgggcttccgctttcgcttttttcagctggtcggtcgcgctggcctttgcaaggtcaaggtccttatgtgctcgttctgcggaagcaaggccgtcagcaatttctttttgacgtttttcgatggctgccattaatggcggccatacgtacttcatgcagaacagaacgaacaggacaaacgcgatggcctggccgaggattgttgcgttaagattcacagcacaatgcctctatttagttaacgttctgatattgctctttaaataaaagcaacgcttattacgcgacagcgaacatcacgtacagacccagacctacagcgatcatcgggatagcatccaccagacccataacgataaagaactgagtacgcagcagaggaatcagatcaggttgacgcgctgcgccttccaggaatttacccccgaggatgccgataccgatcgcagcaccgattgccgccagacccatcatcacagcggcagccatgtacagcagatccatattcaggttttccatgacagtctccagtttgtttcagttaaaacgtagtagtgttggtaaattaatgttcttcagacgccatgctcagatagacgatcgtcagaaccatgaagatgaaggcttgcagcgtaatgatcaggatgtggaaaatggcccacggcacattcaggatccactgactccaccacggcaacagaccagcaatcagaatgaaaatcagctcaccggcatacatgttaccgaacagtcgcaaaccgagactaactggtttggacagcaggcttaccccttcaaggattaagttgacaggaatgaacgcccagtgattgaacggctgcagcgtcaactctttcgtgaagccgccgatgcctttcattttgatgctgtagaacagaatcaggataaatacgcccagtgccatagacagcgttacgttcacgtccgcagacggaaccacacgcagtgcaggcagacccagtacatgttcagcaatgtacggcagcaggtcgataggcagtaaatccatcaggttcatcaggaatacccagacgaagatcgtcagggccagcggagcaatcagcttgcttttgccatggtacatgtctttcacgctaccattaacaaagccgatcaccagctcaatcgcggtctgaaacttacctggcacaccgctggtcgcctttttggctacgctacggaataaaaccaggaacaacagacccagcaccacgctgaagaacatggagtcaatattgattgtccagaaggtggctggggggttttgtggatccaccaggctgaatgtacgcaggtccagctgaaggttattcaggtggtgtcctatgtaatcctgcggcgtcatattttcactagccatgatgccttttaccctttgttgttaattacagccggtgccagtatctgaaccaccagcaccaaaacccacgtaacgatcagcggcaagaataccgcctttaaaaccgccaacgccaccaccagtaacaccaacatcgccagaactttgaaagcttcgccaaatgcgaatgtccaggccacccggcctttcgctggtgtatgcgcctggtgacgccaggcaaatatcataaacaaaacgttaggcagaaagactgccaggcccccgcttattgcagagacgccccagaaggggtctttgaggctgaacagcaatccacttgctatcaccaccagtaactgaacgagcagaagcttccgagcaacgtttcgactcacgaggctcacagacatcacgtttttcactcctgctcccttcgaggtatgccgcgtgtcgtataaaactttctttaaggcttagagtcaagcatcaaaaagcggtcaaattatacggtgcgcccccgtgatttcaaacaataagtagccaaaaggtgaataaatgtttaaatatttttccagtgcatacaattgcgacttttctgctaaccctgttcgatcatgaaaaactgtaaataacgcgtaaacactggtgataaagcgtgcttcagatcacatattgcgcatgttcgcgcacagcatatttatttacttggcaaatgatgcctttgcaagtttatgatatttcagtctaaaaacagatactgttttaataaatgacatttacacaacaaaaaccacccattgacatttttaataatgttttaacagccaatgatggttcttagcgccgatttttagcagactgatattttcactaatgacttattttctgcttaccaaaaaaagccacgttatcttgttgatgcaaaagagtgaacgtggcgttaaatgtaaccagttatatcagtagaaaacctggttgttgttaacagtctaaccggtcaattttttatgatttttttgataaaaattaaattttatttgctttaatcaccaccagatgacgttcgccatccagggctggaacctgaagtttaaccacactttcgacctgatattcttcgggcaacaaagcgatttcatcttccggcatttgccctttcagcgcgtagaaacggccttgctcaccaggaagatggtggcaccagctcaccatatcgttcagagaggcaaaagcgcggctaattacgccatcaaatggcggctcactaggaaactcttctaccctgctctgtactggttcaatattctccagtttaagctcatgttgcacctgacgaaggaaacgcacgcgtttaccaaggctatccaacagagtgaaatgggcttcaggacgcacgatagagagtggaatgcctggcagtcctggtccggtgccgacatcgataaaccgttcaccttgcagatacggtgccaccacaatgctatcgagaatatggcgtaccagcatctcattaggatcgcggacgctagtcaggttgtacgctttgttccatttatgcagcatattcacgtaggcaataagctggtttttctggtgatcggtaaggctaatacctgcgtctttcagcagtaaggagagtttgttgagcacggtgattacctgttcttgatgcgttgcctggtaagcgggtgcttaccaggcatttttaatgcgttatgcgctacgacgcagcataccctgttttttcagccacaccagcagaatggagatggccgcaggcgtgacgccagaaatacggctagcttggccgatagaggctggtttgtgatcgttaagtttggcgatcacttcgttagaaagaccggatacctggcggtaatccagtgtcgcgggtagcagggtgttctcgttacgcagctgcttttcgatctcatcttgctggcgcgcgatataaccttcgtatttaacctgaatctcaacctgttccgccgcctgttcgtctgtcaacgcaggggcaaacggcgtcagcgtggttaatttttcataagtcatttccggacgacgcagcagatcttcaccactggcttcacgggaaagcggcgcagtcaggtgagcattcacttcggctgcagcttccgcgctcggggttacccaggtgcttttcagacgctgacgctcacgctcgatattctcaagtttctcgttaaagcgcgcccaacgttcgtcatccaccaggcccagttcacgaccgatttcagtcaaacgcagatccgcattatcttcgcgtagcatcagacgatattctgcgcggctagtaaacatacgatacggttctttggttcctaaagtgcacaggtcatcaactagtacgccgagatacgcctgagaacgtgccggagcccaaccttctttgtcagcagacagacgggcagcgttaagaccggccagcaaaccttgcgcagcggcttcttcgtaaccggtagtgccgttaatctgaccagcaaagaacagcccctggataaacttgctctccagcgtcggtttcaggtcgcgaggatcgaagaagtcatactcaatggcataacccggacgcacgatcttcgcgttttccatcccctgcatagagcggacgatttgcatctgcacatcgaacggcaggctggtggagataccgttcggataaatttcattagaggtcagtccttccggttcaaggaagatctgatgctgatttctgtcggcgaagcgcatgactttgtcttcgatgctcgggcagtagcgtgggccgacaccttcgatcacccctgcgtacattgggctacgatcgaggttactgcggatcacatcatgggttttctcgttggtatgagtgatataacacggcacctgctggggatgctgggacgcattgcccataaagctgaataccggcattgggttatcgccatgctgttgcgccagtacgctaaagtcgatggttcgagcatcaatacgcggtggtgtcccggttttcagacgaccaacgcgcagcggcagttcacgcaaacggcgagaaagcggaatggacggcggatcaccagcacggccaccgctgtaattatccagaccgatatgaattttaccgtcgaggaacgtcccaacggtgagcacgacggctttggcacggaacttcagtcccatttgggtaacagcaccgaccacgcgatcgttttcgacaataagatcttcaaccgcctgctggaagatcatcaggttcggttggttctccagcgccgtacgtaccgcctgacggtagagcacacgatccgcctgagctcgggtagcgcgaaccgccggtcctttgcttgcgtttagtatcctaaactggatacccgcctgatcgatcgctttcgccatcagaccgccgagtgcatccacttcttttaccagatgtcccttcccaataccgccgatcgccgggttgcagctcatctgccccagagtgtcgatattgtgtgtcaaaagcagagtctgttgacccatacgcgccgcggccatcgcggcctcggtgcctgcatgacccccgccaatgatgatgacgtcaaaaggatccggataaaacatggtgattgcctcgcataacgcggtatgaaaatggattgaagcccgggccgtggattctactcaactttgtcggcttgagaaagacctgggatcctgggtattaaaaagaagatctatttatttagagatctgttctattgtgatctcttattaggatcgcactgccctgtggataacaaggatccggcttttaagatcaacaacctggaaaggatcattaactgtgaatgatcggtgatcctggaccgtataagctgggatcagaatgaggggttatacacaactcaaaaactgaacaacagttgttctttggataactaccggttgatccaagcttcctgacagagttatccacagtagatcgcacgatctgtatacttatttgagtaaattaacccagcttcccagccattcttctgccggatcttccggaatgtcgtgatcaagaatgttgatcttcagtgtttcgcctgtctgttttgcaccggaatttttgagttctgcctcgagtttatcgatagccccacaaaaggtgtcatattcacgactgccaataccgattgcgccaaagcggactgcagaaagatcgggcttctgttcctgcaatgcttcatagaaaggagaaaggttgtccggaatatctccggcaccgtgggtggagctgataaccagccagatcccactggcaggtaaatcttctaacagcggaccgtgcagcgtttcggtggtaaaacccgcctcttccagcttttcagccaggtgttctgctacatattcggcaccgccgagggtgctgccgctgataagagtgatatctgccataaaccgccacctttattaagagtggcgtattgtacgctgtgaacgcgttgggatctacctgtggaaaagtatgggattaaaaaagccgatcagggcttgatggtacgcatgatcgggttttgcaggacgatcaatgtctcggtggactgaatttcatcaattgtttggatcttgttgataagtacatgctggagagcgtcgatgctacggcacatcacttttataaagatgctgtagtggccggttgtgtaataggcttcagtgacttcatcaaggctttccagctttgccagcgcggaagggtagtctttggcgctctttaatataatgccgataaagcagcctacgtcataaccgagctgcttcgggctgacatcaatacgcgccccggtaatgatccccgcctgcttcattttctctactcgaacgtgaatcgtccccggactgacgccaaattgtttcgccagttcggcgtaagcggtgcgcgcattgcccattaatgcttccaggatgccacggtccagattgtcgatcagataattttccataggattttcttatgcggattgatgattcattctattttagccttcttttttaatgaatcaaaagtgagttaggctttttattgaatgattattgcatgtgtgtcggtttttgttgcttaatcataagcaacaggacgcaggagtataaaaaatgaaaaccgcttacattgccaaacaacgtcaaattagcttcgtgaaatctcacttttctcgtcaactggaagaacgtctggggctgatcgaagtccaggcgccgattcttagccgtgtgggggatggcacgcaggataacttgagcggctgtgaaaaagcggtgcaggtaaaagtgaaagctctgcctgatgcccagttcgaagtggttcatagtctggcgaagtggaaacgtcagaccttagggcaacacgacttcagcgcgggcgaagggctgtacacgcacatgaaagcccttcgccccgatgaagaccgtctttctccgttgcacagcgtctatgttgaccagtgggactgggaacgcgtaatgggcgacggtgagcgtcaattcagcactctgaaaagcacggtagaggcgatctgggcgggaattaaagcaaccgaagctgcggttagcgaagagtttggcctggcaccgttcctgccggatcagatccacttcgtacacagccaggagttactgtctcgttatccggatcttgatgccaaagggcgtgagcgggcgatagcgaaagatcttggcgcggtattccttgtcgggattggcggcaagctgagcgatggtcatcgccacgacgtgcgcgcaccggattatgatgactggagcaccccgagtgagctgggccatgcgggtctgaacggcgatattctggtgtggaacccggtactggaagatgcgtttgagctttcctccatggggatccgtgtagatgccgacacgctgaagcatcaactggcgctgaccggtgacgaagatcgcctggagctggagtggcatcaggcgctgctgcgcggtgaaatgccgcagaccatcggcggcggtatcggccagtctcgtttgactatgctgctgctgcaactgccgcatatcggccaggttcagtgtggagtatggccagctgctgttcgcgagagcgtcccttctctgctgtaataatttatcgccgccagcgtctgagcaggcggcttcgcatcccggtatcaaagcgccagatatgatcgaaaatgcgcatgatgccgggtttgccgtgtgcgctcatcgccacggcatgaaagcgatgctgatgtacccgctgcagctctttcactttactcgtcacgtcgtcaggcaaccgctgagcgataaaatcagaaatcaccaccgcatcggcatcaaaccattccctgctttgcaagcgttccataatggcgcgaaaacaactggcaagatcggtgccgccacgaaactgctggcttaaaaaacggattgcttgttcgatgccttgtgggccactaagctcataacggacgatctcggtggaaaatagcataatatagcagcgccggttttctgcgagagcaatgcgcatcaaggccaggcagaacgctttcgcacactgttcattaaagccgcccatactgccggaagtatccacacagacaataaacggcccgcgcggctgttcatcgtaatctttatgtaccaccggacgttcgatcactttttcacgccagctctcaccgtgcaggcgataggtgagcaactgtttttccaccagccgacggtaaaactcatactccagttccgttatccctagtgtcgccagttctggcggcaggagacgtaaaatatcatcgctttgttgcagaccatcaacctgctcaggaaccgtcgccggttcgcgcaccatggtgcggaaggtttccatctgcgcatcgttgcgcggtatacttttggcttcccgagaacgccccagctgctctgccaggcgtttcagttccggctgttcgttaagaaattcaccgtatttcacaatcaactgatagtcgccacgtttaagctgaccggcgctcatatcccacagacgaccagctgcagtattgttatctgcgagaatcggttcaagttgtccgctcagcgtcatgcgttcctgaacttcactcaacagttgttcgcgttcttcttctaatagctgttgatttaacgtcgttgcttgcacgatcagacttaaacgccaacgctggagaaaaagcgtgtgtaacgcactagtgatcgtgctgttagcatcaaccaactgtcgggcttgttctgcccatggagaattcagacgatgcagtaagtccaggatctgtggtagctgcacaataaactgtggcgtggagaggagctggctttgctgatagcacatcacctcttcggtgagttccggcgggactcgggcatctttcagccgactgcgcagcgcttcacgccagcggggaacatcatcagtgattgccgccttcaggcgtgggaatttttcaaagaagaccgccagctgcggactggccagcagtgcgatgatcatctcttcgatcaatccctcttcgctgacggccagcatcacattaagcgtatccagcgttagcattgttgtgcctggcgaatctgtgcaccgacatcctgtaggctggcttcaatgcgacctaaccagtcgccagggataaacagacatttttgctgttcgctgaataaagcgtgttgcttgcgccagtcgctttcaagctcttccagttgttgttttatttcaccaggcagaccttcagcgctactaccgggaagtgccagcgtactgccttgtaaacttacatcgcgaacgacaagatgttgggcgctatcaacttccagattcagtttctgggcaaagccgataccgttcagtttaccgcgaatttcaccacctttgctcagccactgttccagcgcgctacgctcaaaggagatatgaaccacttccatatcatgcagttttaacggtttttgcagcagtagagtcagagtggaagcagtaacgttaacaggaagttgatactgctgacgacggctgaaaatgccgcccagacgaattaccgttaaggctgttttatcgctttgttgctgctggagttgcaggtgacgttgcacaatcgcgccaaggcgagtcaacatcccttgctgttgccaggcgtgaccggtcatcaatacatcaatttgttgttgtatcaaattcaggctttgcgcgtcataccacaggcaatctttcagcaaaatgagatctaccggggcaacagcactgcgaccgctaaaaaaggcgctggcctgcaataatcggatcgcttttttccagcgacgatcgctgacataaggcgcatccggtaatttatccagttgctggcgcagcataaaaatcagctcaaatacatgatcgggcagcgtaatttcaccaatctctttctgccagcgttcatattcttcatctgtgacctgcaaggcatcaggaaccggattgtcgttttcatcctgttgactggtcagcatggagcggaaattcgctttatcctgcactttatctaaccacagacgaatcagcatgcggtcatataacgcttccagactgctgtctgcttccggcagctcgttggaggccgccaccagcagacgcatcgggattttttctacgtgtgcaccgttgcggaactggcgctcgttaatggcggtgagcaaggtattaagaattgccgggcccgctttccagatctcatccagaaagacaatttctgcttccggcaggtaaccgctggttaaacgttcatagcgcccttcatcttttagcgcctgaatagaaaggggaccaaaaacttcttccggcgtggagaagcgggtcatcagatattcaaacgcgcgggcattctgaaaggcgaattttaagcgccgggcgatcaaacttttggcaatacctggcgggccaaggaggaacacactttcaccacttaatgccgctaataaacacaagcggatggcgtggctacgttcataaagccccttttccaagctactgctcaggcgggaaattctttccgctaataaatgagggtgagccataatgaagtggcgtcctttcgtcaaaagttctgcgtaaattgcgagtatagacgtttcttgctggtggctaaaatagtctcaaagggggggtatttttctttgagccaggttaatgtggccgcatttaggagtacgattttgccgttaatcgtgcatactgtgcgcttttttgtgggccaagggactaagcacacatttcatatttcaacgaaagactagtctatgagcactgataataagcaaagtttgcccgcgattaccctcgcggcgattggagttgtctacggcgatattggtaccagcccgttatatacacttcgtgaatgtttgtccggccagtttggttttggcgttgaacgcgatgccgtgtttggctttttaagcctgatcttctggctgctaatctttgtggtttccattaaatatctcaccttcgtgatgcgggcagataacgccggtgagggggggatcctgacgttgatgagccttgccgggcgtaatacgagcgcgcgaaccacaagtatgctggtgattatggggctaatcggcggcagctttttctatggtgaagtcgtcataacacccgctattagcgtgatgagtgccattgaaggtctggaaatcgtcgccccgcagctggatacctggatagttcccctcagtattatcgttctcactttattatttatgattcaaaaacatggcacggctatggtcggtaagctgtttgcgccgatcatgctgacctggtttttgattctggcaggactggggttacgtagcattattgctaacccggaagtgctgcatgcgctgaatccaatgtgggcggtgcatttcttccttgaatacaaaacggtttcttttattgcattaggggcagtggtgttgagcattacgggggtcgaggcgctgtatgctgatatggggcactttggtaagttccctattcgcctggcgtggttcaccgtcgtattaccttccttgacccttaattacttcggtcagggagcgctgttgttaaagaacccggaagcgattaagaacccgttcttcctgttggcaccggactgggcgctgatcccgctgctgatcatcgccgcactggcgacggtaattgccagccaggcggttatctctggcgtcttcagtttgacgcgtcaggcggtacgtctgggatatttgagcccgatgcgcattattcacacctccgaaatggagagtgggcaaatctatattccgtttgtgaactggatgctctatgtcgcggtcgtgattgtgattgtcagctttgagcactccagcaacctggcggcggcgtacgggattgcggtgaccggaaccatggtgctgacgtctattctcagcactaccgtggcacgtcagaactggcactggaataagtattttgttgcgctgatcctgattgctttcctttgtgtcgatattccattgttcaccgctaacctcgataaactgctctccggcggctggttgccattgagcctcggtactgtgatgtttatcgtgatgaccacctggaagagcgagcgtttccgcttgctgcggcggatgcatgaacatggtaactctctggaagcgatgattgctagcctggagaaaagtccgcctgttcgcgtgcccgggaccgcggtgtatatgagccgtgcaatcaacgtcattccctttgcgctgatgcataaccttaaacataacaaggtattgcatgagcgggtgattctgttaactctgcgcaccgaagacgctccatatgtccataacgtccgtcgggtacagattgaacaactgagccccactttctggcgcgtggtggcaagttatggttggcgagaaacgccaaacgtagaagaagttttccaccgctgcggtctggaaggattaagttgccggatgatggaaacctccttctttatgagccatgagagcttgatcctcggcaaacgcccgtggtatttgcgtctgcgcggcaagctgtacttgctgctgcaacgtaatgcgctgcgtgcaccagatcaatttgaaatcccgccaaacagggttatcgaactgggtactcaggtcgaaatctaacgccagacgcctcctttcttcataagggggcgtttttgttttcatggttaatcaccatgtaaaacgtttcgaggttgatcacatttccgtaacgtcacgatggttttcccaactcagtcaggattaaactgtgggtcagcgaaacgtttcgctgatggagaaaaaaatgaaaaaaggcaccgttcttaattctgatattagtagcgtgatctcccgtctgggacataccgatacgctggtggtgtgtgatgctggtttacccatccccaaaagtacaacgcgtatcgatatggcattaacccagggtgtaccttcttttatgcaggtgctgggcgtcgtcacaaatgaaatgcaggtcgaggcggccattatcgcggaagagatcaaacaccataatccgcaactccacgaaacgttgctcactcaccttgagcagctgcaaaaacaccagggaaataccattgaaattcgttacaccacgcatgaacaattcaaacaacaaaccgcagaaagtcaggcggtaattcgcagcggagaatgttctccgtatgcgaatatcattctctgtgctggcgtgacgttctgaggccgtcatggaagcattacttcagcttaaaggcatcgataaagccttcccgggcgtaaaagccctcagcggcgcagcgttaaatgtctatccgggccgcgtgatggcgctggtgggcgaaaacggcgcgggtaaatccaccatgatgaaagtgcttactggcatctatactcgcgatgccggtacgcttttatggctggggaaagaaacgacatttaccgggccaaaatcttcccaggaagccgggattgggattatccatcaggaactgaacctgatcccgcagttgaccattgccgaaaacattttcctcggtcgtgagtttgttaatcgctttggcaaaattgactggaaaaccatgtatgccgaagcggataaattgctggctaaacttaacctgcgctttaaaagcgacaagctggtgggcgatctttccatcggtgaccagcaaatggttgaaatcgccaaagtgctgagctttgagagcaaagtcatcattatggatgaaccgaccgatgcgctgaccgataccgaaaccgaatccctgttccgcgtcatccgcgagctgaaaagccaaggccgcggtattgtctatatctcccaccgcatgaaagaaatcttcgagatttgcgatgacgttaccgtttttcgtgatgggcaatttattgctgagcgcgaagtggcaagtctgaccgaagatagcctgattgagatgatggtgggtcgcaagctggaagatcaatatccgcacctggacaaagcgccgggagatatccgcctgaaagtcgataatctctgcggacctggcgttaacgatgtctcttttactttacgcaaaggcgaaattcttggcgtctctggtttgatgggcgcaggtcgtaccgaactgatgaaagtgctctacggcgcactaccgcgcaccagcggttacgtcaccctggatgggcatgaagtcgttacccgtagtccgcaggatggcctggcaaacggcattgtgtatatctccgaagaccgtaaacgtgacggtttagtgttgggcatgagtgtaaaagagaacatgagcctgacagcgctgcgctacttcagccgcgctggcggcagtttgaagcatgccgatgaacagcaggctgtgagtgatttcattcgtctgtttaatgtgaaaactccgagcatggaacaggcaattggtctgctttccggtggcaatcagcaaaaagtggcgattgcccgcggtctgatgacacgccccaaagtgttgatccttgatgaacctacccgtggcgtagatgtcggcgcgaaaaaagagatctatcaactgattaaccagttcaaagccgatggcttgagcatcattctggtgagtagcgagatgccagaagtattaggcatgagcgatcgcatcatcgtcatgcatgaagggcatctcagcggggaatttactcgtgagcaggccacccaggaagtgttaatggctgccgctgtgggcaagcttaatcgcgtgaatcaggagtaaaaaaatgacaacccagactgtctctggtcgccgttatttcacgaaagcgtggctgatggagcagaaaagccttatcgctctgctggtgctgatcgcgattgtcagcacgttaagcccgaactttttcaccatcaataacttattcaatattctccagcaaaccagtgtgaacgccattatggcggtcgggatgacgctggtgatcctgacgagcggcatcgacttaagcgtaggttctctgttggcgctgaccggcgcagttgctgcatctatcgtcggcattgaagtcaatgcgctggtggctgtcgctgctgctctcgcgttaggtgccgcaattggtgcggtaaccggggtgattgtagcgaaaggtcgcgtccaggcgtttatcgctacgctggttatgatgcttttactgcgcggcgtgaccatggtttataccaacggtagcccagtgaataccggctttactgagaacgccgatctgtttggctggtttggtattggtcgtccgctgggcgtaccgacgccagtctggatcatggggattgtcttcctcgcggcctggtacatgctgcatcacacgcgtctggggcgttacatctacgcgctgggcggcaacgaagcggcaacgcgtctttctggtatcaacgtcaataaaatcaaaatcatcgtctattctctttgtggtctgctggcaagcctggccgggatcattgaagtggcgcgtctctcctccgcacaacccacggcggggactggctatgagctggatgctattgctgcggtggttctgggcggtacgagtctggcgggcggaaaaggtcgcattgttgggacgttgatcggcgcattaattcttggcttccttaataatggattgaatttgttaggtgtttcctcctattaccagatgatcgtcaaagcggtggtgattttgctggcggtgctggtagacaacaaaaagcagtaataacgactacaggacatcttgaatatgaacatgaaaaaactggctaccctggtttccgctgttgcgctaagcgccaccgtcagtgcgaatgcgatggcaaaagacaccatcgcgctggtggtctccacgcttaacaacccgttctttgtaagcctgaaagatggcgcgcagaaagaggcggataaacttggctataacctggtggtgctggactcccagaacaacccggcgaaagagctggcgaacgtgcaggacttaaccgttcgcggcacaaaaattctgctgattaacccgaccgactccgacgcagtgggtaatgctgtgaagatggctaaccaggcgaacatcccggttatcactcttgaccgccaggcaacgaaaggtgaagtggtgagccacattgcttctgataacgtactgggcggcaaaatcgctggtgattacatcgcgaagaaagcgggtgaaggtgccaaagttatcgagctgcaaggcattgctggtacatccgcagcccgtgaacgtggcgaaggcttccagcaggccgttgctgctcacaagtttaatgttcttgccagccagccagcagattttgatcgcattaaaggtttgaacgtaatgcagaacctgttgaccgctcatccggatgttcaggctgtattcgcgcagaatgatgaaatggcgctgggcgcgctgcgcgcactgcaaactgccggtaaaagcgatgtgatggtcgtcggatttgacggtacaccggatggcgaaaaagcggtgaatgatggcaaactagcagcgactatcgctcagctacccgatcagattggcgcgaaaggcgtcgaaaccgcagataaagtgctgaaaggcgagaaagttcaggctaagtatccggttgatctgaaactggttgttaagcagtaattttaatcaggttgtatgacctgatggtgacataaatacgtcatcgacagatgaacgtgtaatataaagaaaagcagggcacgcgccaccctaacacggtggcgcattttatggacatcccgaatatgcaaaacgcaggcagcctcgttgttcttggcagcattaatgctgaccacattcttaatcttcaatcttttcctactccaggcgaaaccgtaaccggtaaccactatcaggttgcatttggcggcaaaggcgcgaatcaggctgtggctgctgggcgtagcggtgcgaatatcgcgtttattgcctgtacgggtgatgacagcattggtgagagcgttcgccagcagctcgccactgataacattgatattactccggtcagcgtgatcaaaggcgaaagtacaggtgtggcgctgatttttgttaatggcgaaggtgagaatgtcatcggtattcatgccggcgctaatgctgccctttccccggcgctggtggaagcgcaacgtgagcgtattgccaacgcgagtgcattattaatgcagctggaaagtccactcgaaagtgtgatggcagcggcgaaaatcgcccatcaaaataagactatcgttgcgcttaacccggctccggctcgcgaacttcctgacgaactgctggcgctggtggacattattacgccaaacgaaacggaagcagaaaagctcaccggtattcgtgttgaaaatgatgaagatgcagcgaaggcggcgcaggtactgcatgaaaaaggtatccgtactgtactgattactttaggaagtcgtggtgtatgggctagcgtgaatggtgaaggtcagcgcgttcctggattccgggtgcaggctgtcgataccattgctgccggagatacctttaacggtgcgttaatcacggcattgctggaagaaaaaccattgccagaggcgattcgttttgcccatgctgccgctgcgattgccgtaacacgtaaaggcgcacaaccttccgtaccgtggcgtgaagagatcgacgcatttttagacaggcagaggtgacgcttggctacaatgaaagatgttgcccgcctggcgggcgtttctaccagtacagtttctcacgttatcaataaagatcgcttcgtcagtgaagcgattaccgccaaagttgaagcggcgattaaagaactcaattacgcgccaagtgctctggcgcgtagcctcaaactcaatcaaacacataccattggcatgttgatcactgccagtaccaatcctttctatagtgaactggtgcgtggcgttgaacgcagctgcttcgaacgcggttatagtctcgtcctttgcaataccgaaggcgatgaacagcggatgaatcgcaatctggaaacgctgatgcaaaaacgcgttgatggcttgctgttactgtgcaccgaaacgcatcaacctagccgtgaaatcatgcaacgttatccgacagtgcctactgtgatgatggactgggctccgttcgatggcgacagcgatcttattcaggataacagcttgctgggcggagacttagcaacgcaatatctgatcgataaaggtcatacccgtatcgcctgtattaccggcccgctggataaaactccggcgcgcctgcggttggaaggttatcgggcggcgatgaaacgtgcgggtctcaacattcctgatggctatgaagtcactggtgattttgaatttaacggcgggtttgacgctatgcgccaactgctaagtcatccgctgcgtcctcaggccgtctttaccggaaatgacgctatggctgttggcgtttaccaggcgttatatcaggcagagttacaggttccgcaggatatcgcggtgattggctatgacgatatcgaactggcaagctttatgacgccaccattaaccactatccaccaaccgaaagatgaactgggggagctggcgattgatgtactcatccatcggataacccagccgacccttcagcaacaacgattacaacttactccgattctgatggaacgcggtagcgcttaattactcgctttcacttggaacgcggttcggcttagatttacgctgtcttttgatcaaattattaccatcggttgttttcagaagcatgaacattgctgcactagcaacagtaataatgcccattgtgataaacgtatagtggaattgttcgacagtcgttgtgccttccattccttcataaacgcgaaggacggccgcacttacagcaacgcctaaactaatgctcagttgctgcgtgaccgccagaacactgttaccgctgctggcattgtcatcggtcagatcggcaagtgtgatggtattcatcgcggtaaactgcgtgctcatagccatccctaatataaacaacggcaagatcagcatccatatagccattgctggactttgcaaagagaactgagcgatcattagcccaataatcaccgtgatccccactaacgtatggcgatagcccagacgacgtaagacttgggtaaccatgctttttgcaataatggaacctaacgctgtcggtgccatcatacagccagcaataaacgcctgataaccaaatcctacctgtaacatcaatggcataaggaacggtacacagccggtccccagacgggttgcaatattgcctacgataccgatgctgaaagtgcgggttttaaataaatctaaactaattaatgggtttggcgtgcgtcgtgcatggagaatatagagaagcagtaacccgatgctggtgacaattaccgtcaaggcaatccagctggcgacaatcttttccccgaatagctctattccgctactgaagagaacaaggctgaggccaaacagcaaaaagccagtgatatcgaatctgcgtcgtgcggtggtgaaattgggcatatgtttgcgcgcgtaaagaaggcccgcaatacctatggggatattgattaaaaatatccagtgccaggttgcccaggtgaccagcacgccgccaagaacggggcctaaaattggccccaccagacccggcatggcgacaaaattcaatactggaagaagttcattacgaggataagcgcgcagtaaggccagccgagcaacaggcatcatcattgcgccgcctatcccctgaataacccggaagacaaccagctgtggtaggctattagaaagtgcgcaggccagagaacccaatgtgaacagactcacggcaagggtaaaaatgcgacgcgtaccgaagcgatcggctagccatccgcttaccggaataagcatcgccaccgtcagcgtataactgatgatggcactttgcatcgcgagaggagaacgattaaggctatgagcgattgcgggtaaggcggtattaagaatagtggcatcaagtgcctgcatgaagaaggccatcgccgcgatccacggcaaacccgccatactgcgcttctttttatcgctcattcaatgtcctgttatcgggttatcacttatcaggactgcgtagcagcgcctgacaagctttaaatgccgcgtcgccatcgctttggataatcgcatcgacaatcgcctgatgcagatccagctttatcactgtgtcgctggtaatactcgtgaagtaagtgtgataaacgctatggaataggctggcgaaactggtcaaaaacggattggcgctcatttcatagatatgctcatgccaggccatatcgacttcgatccagcgttcacggcgaaagttctcttttaatgccgccatttcggccattaacgtattgagatgcgctttctgttccgcggtgccaaccgttgctgccagtaggcaggcttgcggctccagacagatacgcataaccagaaagtgatcgatgacctgatgaaagttctcttctgtcatccaccaggtaagcaattcctgatcaagaaaattccagttgctttgtggcatgacccgagtaccaattcgcggtcgcggtaaaaccatcccttttgccgttaacgttttgaccgcttcgcgtaccgctgtacgactcactccaaattgctcgcccagctcaatctcaccgggcaaaatggtgccgggttcatattcaccttttaagatccgttgcgccagcttctcagccagaacatagctaaggtttttctgtgcagctaactgttgtgcgcttaaaggcattacttatcttcctttttctttttattcctccttagtatgccaccaggaagtgtgattacggttgcaaaaacggcaaattgcttgttttatggcacattaacggggcttttgctgaaaaaatgcgcggtcagaaaattattttaaatttcctcttgtcaggccggaataactccctataatgcgccaccactgacacggaacaacggcaaacacgccgccgggtcagcggggttctcctgagaactccggcagagaaagcaaaaataaatgcttgactctgtagcgggaaagcgtattatgcacaccccgcgccgctgagaaaaagcaaagcggcactgctctttaacaatttatcagacaatctgtgtgggcactcgaagatacggattcttaacgtcgcaagacgaaaaatgaataccaagtctcaagagtgaacacgtaattcattacgaagtttaattctttgagcatcaaacttttaaattgaagagtttgatcatggctcagattgaacgctggcggcaggcctaacacatgcaagtcgaacggtaacaggaaacagcttgctgtttcgctgacgagtggcggacgggtgagtaatgtctgggaaactgcctgatggagggggataactactggaaacggtagctaataccgcataacgtcgcaagaccaaagagggggaccttcgggcctcttgccatcagatgtgcccagatgggattagctagtaggtggggtaacggctcacctaggcgacgatccctagctggtctgagaggatgaccagccacactggaactgagacacggtccagactcctacgggaggcagcagtggggaatattgcacaatgggcgcaagcctgatgcagccatgccgcgtgtatgaagaaggccttcgggttgtaaagtactttcagcggggaggaagggagtaaagttaatacctttgctcattaacgttacccgcagaagaagcatcggctaactccgtgccagcagccgcggtaatacggagggtgcaagcgttaatcggaattactgggcgtaaagcgcacgcaggcggtttgttaagtcagatgtgaaatccccgggctcaacctgggaactgcatctgatactggcaagcttgagtctcgtagaggggggtagaattccaggtgtagcggtgaaatgcgtagagatctggaggaataccggtggcgaaggcggccccctggacgaagactgacgctcaggtgcgaaagcgtggggagcaaacaggattagataccctggtagtccacgccgtaaacgatgtcgacttggaggttgtgcccttgaggcgtggcttccggagctaacgcgttaagtcgaccgcctggggagtacggccgcaaggttaaaactcaaatgaattgacgggggcccgcacaagcggtggagcatgtggtttaattcgatgcaacgcgaagaaccttacctggtcttgacatccacggaagttttcagagatgagaatgtgccttcgggaaccgtgagacaggtgctgcatggctgtcgtcagctcgtgttgtgaaatgttgggttaagtcccgcaacgagcgcaacccttatcctttgttgccagcggtccggccgggaactcaaaggagactgccagtgataaactggaggaaggtggggatgacgtcaagtcatcatggcccttacgaccagggctacacacgtgctacaatggcgcatacaaagagaagcgacctcgcgagagcaagcggacctcataaagtgcgtcgtagtccggattggagtctgcaactcgactccatgaagtcggaatcgctagtaatcgtggatcagaatgccacggtgaatacgttcccgggccttgtacacaccgcccgtcacaccatgggagtgggttgcaaaagaagtaggtagcttaaccttcgggagggcgcttaccactttgtgattcatgactggggtgaagtcgtaacaaggtaaccgtaggggaacctgcggttggatcacctccttaccttaaagaagcgttctttgcagtgctcacacagattgtctgataggaagtgaaaagcaaggcgtcttgcgaagcagactgatacgtccccttcgtctagaggcccaggacaccgccctttcacggcggtaacaggggttcgaatcccctaggggacgccacttgctggtttgtgagtgaaagtcacctgccttaatatctcaaaactcatcttcgggtgatgtttgagatatttgctctttaaaaatctggatcaagctgaaaattgaaacactgaacaacgaaagttgttcgtgagtctctcaaattttcgcaacacgatgatgaatcgaaagaaacatcttcgggttgtgaggttaagcgactaagcgtacacggtggatgccctggcagtcagaggcgatgaaggacgtgctaatctgcgataagcgtcggtaaggtgatatgaaccgttataaccggcgatttccgaatggggaaacccagtgtgtttcgacacactatcattaactgaatccataggttaatgaggcgaaccgggggaactgaaacatctaagtaccccgaggaaaagaaatcaaccgagattcccccagtagcggcgagcgaacggggagcagcccagagcctgaatcagtatgtgtgttagtggaagcgtctggaaaggcgcgcgatacagggtgacagccccgtacacaaaaatgcacatattgtgagctcgatgagtagggcgggacacgtggtatcctgtctgaatatggggggaccatcctccaaggctaaatactcctgactgaccgatagtgaaccagtaccgtgagggaaaggcgaaaagaaccccggcgaggggagtgaaaaagaacctgaaaccgtgtacgtacaagcagtgggagcacgcttaggcgtgtgactgcgtaccttttgtataatgggtcagcgacttatattctgtagcaaggttaaccgaataggggagccgaagggaaaccgagtcttaactgggcgttaagttgcagggtatagacccgaaacccggtgatctagccatgggcaggttgaaggttgggtaacactaactggaggaccgaaccgactaatgttgaaaaattagcggatgacttgtggctgggggtgaaaggccaatcaaaccgggagatagctggttctccccgaaagctatttaggtagcgcctcgtgaattcatctccgggggtagagcactgtttcggcaagggggtcatcccgacttaccaacccgatgcaaactgcgaataccggagaatgttatcacgggagacacacggcgggtgctaacgtccgtcgtgaagagggaaacaacccagaccgccagctaaggtcccaaagtcatggttaagtgggaaacgatgtgggaaggcccagacagccaggatgttggcttagaagcagccatcatttaaagaaagcgtaatagctcactggtcgagtcggcctgcgcggaagatgtaacggggctaaaccatgcaccgaagctgcggcagcgacgcttatgcgttgttgggtaggggagcgttctgtaagcctgcgaaggtgtgctgtgaggcatgctggaggtatcagaagtgcgaatgctgacataagtaacgataaagcgggtgaaaagcccgctcgccggaagaccaagggttcctgtccaacgttaatcggggcagggtgagtcgacccctaaggcgaggccgaaaggcgtagtcgatgggaaacaggttaatattcctgtacttggtgttactgcgaaggggggacggagaaggctatgttggccgggcgacggttgtcccggtttaagcgtgtaggctggttttccaggcaaatccggaaaatcaaggctgaggcgtgatgacgaggcactacggtgctgaagcaacaaatgccctgcttccaggaaaagcctctaagcatcaggtaacatcaaatcgtaccccaaaccgacacaggtggtcaggtagagaataccaaggcgcttgagagaactcgggtgaaggaactaggcaaaatggtgccgtaacttcgggagaaggcacgctgatatgtaggtgaagcgacttgctcgtggagctgaaatcagtcgaagataccagctggctgcaactgtttattaaaaacacagcactgtgcaaacacgaaagtggacgtatacggtgtgacgcctgcccggtgccggaaggttaattgatggggtcagcgcaagcgaagctcttgatcgaagccccggtaaacggcggccgtaactataacggtcctaaggtagcgaaattccttgtcgggtaagttccgacctgcacgaatggcgtaatgatggccaggctgtctccacccgagactcagtgaaattgaactcgctgtgaagatgcagtgtacccgcggcaagacggaaagaccccgtgaacctttactatagcttgacactgaacattgagccttgatgtgtaggataggtgggaggctttgaagtgtggacgccagtctgcatggagccgaccttgaaataccaccctttaatgtttgatgttctaacgtggacccgtgatccgggttgcggacagtgtctggtgggtagtttgactggggcggtctcctcctaaagagtaacggaggagcacgaaggttggctaatcctggtcggacatcaggaggttagtgcaatggcataagccagcttgactgcgagcgtgacggcgcgagcaggtgcgaaagcaggtcatagtgatccggtggttctgaatggaagggccatcgctcaacggataaaaggtactccggggataacaggctgataccgcccaagagttcatatcgacggcggtgtttggcacctcgatgtcggctcatcacatcctggagctgaagtaggtcccaagggtatggctgttcgccatttaaagtggtacgcgagctgggtttagaacgtcgtgagacagttcggtccctatctgccgtgggcgctggagaactgaggggggctgctcctagtacgagaggaccggagtggacgcatcactggtgttcgggttgtcatgccaatggcactgcccggtagctaaatgcggaagagataagtgctgaaagcatctaagcacgaaacttgccccgagatgagttctccctgactccttgagagtcctgaaggaacgttgaagacgacgacgttgataggccgggtgtgtaagcgcagcgatgcgttgagctaaccggtactaatgaaccgtgaggcttaaccttacaacgccgaagatgttttggcggatgagagaagattttcagcctgatacagattaaatcagaacgcagaagcggtctgatgaaacagaatttgcctggcggccgtagcgcggtggtcccacctgaccccatgccgaactcagaagtgaaacgccgtagcgccgatggtagtgtggggtctccccatgcgagagtagggaactgccaggcatcaaattaagcagtaagccggtcataaaaccggtggttgtaaaagaattcggtggagcggtagttcagtcggttagaatacctgcctgtcacgcagggggtcgcgggttcgagtcccgtccgttccgccaccctaattaggggcgtagttcaattggtagagcaccggtctccaaaaccgggtgttgggagttcgagtctctccgcccctgccagaaatcatccttagcgaaagctaaggattttttttatctgaaataaccctctccgaagtaaatccttctaccggcatccttgccagccattcatattaatacacttcatccagcacgttaattttcaaaagatcgcgaatcaacgcatttttatcgctattttgcagccatatggcataaagcggccgactaagtgttgtgctatcgacaacggtatgcaggccgccttttttacgcgcccagctgacgggtagccaggtgcaaccattaagcatcgcaatctgttgctgtgccagttcagcagaactggttgtcagaatgggcacttcgtcagcaccgatcaaacctgcctcatgctgttgaaaatctggcccccactcaagtcgcagataattaagatctccctttagtttactaggggcactggtataaagcgctaaagtgaaatatcccagcaactgactactaaattcgtccattttgggcgcttcagtggtaataagaagatcaagctggcgttcatgcagctgttttaccagagactgccgttgggcaattcgcgcttcgaactgtaagcctgtatgggcatcctgattttgatacaagcgtcccagccactgattaagcatacattcccacaagctggcgctggcaccgatagaaaactcgttatgtcgactggtatgcgccacctccttacgggcggcctgccaggtgctcatgagcgtttctgcataaggcagtagtttttcaccggcagcggttaaacggatattgtttctgtggcgggtgaaaaggttcacacccagttgattttccagttgtctgattcgaaagctcactgcactctgggtcagatagaggctttcagccgctcgaccaaagtgacgcgttcggctaacttccaggaaagtttttaacaattccgtatccacagtgctctccgcaaaattatttgtcgttatgatttaaatgttttgttttacactctgtcaagcgtaactaatactccgcgccataactagctcggtcaaagaattaggagcgtgcaggatggcggaaagctttacgacgactaatcgatatttcgacaataaacattatccacgtggattctctcgtcatggtgatttcaccatcaaagaggcacaactgcttgagcgtcatggttatgccttcaatgagttggatcttggcaaacgcgagccggttaccgaggaagagaaactcttcgtagcagtatgccgtggcgaacgtgagccagtgacagaagcagaacgcgtgtggtccaagtatatgacgcgtattaagcgtccaaaacgttttcacaccctttccggcggtaaaccgcaggttgaaggtgctgaagactacaccgattctgacgattaataaaaagggcgaaatgccctttttttatgtcagtagtttctgcagatggatgagcaaacggtcaatcgctcgatagctaactgcctcctgcaaatgctgacgtgtgataatgtcagactgatcaatatcagcaatggttcgtgcaactttcaataaccgctgccaggcacgaatgcttaaccccagatggatcagtgttccttccaaccacatcgcatcttcgctctcaagtttgcagaattggcgtatttccggactatccagccaggcattcagtttattctgccgcttaaattggcgctctctggcggccattacgcgttgtttaacggtggcgctgctttctcccggcactaccgttttactcaaaatgccggggggtggtaatgggatctccagactgagatcgaagcggtcgagaaagggcccgctgagccggttgagataacgtaatgtctgttctggcgtgcagcggttatggtttccctgataatgtccggtagggctgggattcatcgccgcaacaagctggaaacgggctggataggttatttttgctcgtgtgcgactaagatggatctgcccggattcaatcggctctcgcaaggcatccagtgtacgccgttcaaattcaggtagctcatcaagaaaaagcacgccgttatgcgccaggctaatttcaccgggccctggaattgcgccaccgcctaccatcgcagttaagcttgcactgtgatgaggactgcggaacgggcgctgccgccattgtttttgtacactttcagcatttaccagacttaatatcgcagcactctccagtgcctcttcattgcttaaatctggcaacaggccattaatacggctggcgagcattgttttacctgttcccggcggcccaatcagtaaaaggttgtgcccgccagcagcggtaatttccagtcctcgctttccttgttcctgaccgataacatcactgagatcatgttgtagcgcccgggatactgcatcagttggtttcgggcgttcgagagcgtgcttaccttccagaaacgcacagacagcttgcagatgatcggctatcaggcatccttcaccgttaattagccccacttcatcttcgttatctttcgcgacgataatttttctgccgctcttaatagcttcagttgcactggagattgcgccgggaacgccacgcagagcgcctgtaagcgccagttctccgactaattcatattcatctaacttattggctgtaagctgttcactggccgccagcaacgcaatggcgataggtaaatcatatcgtcccccttcttttggcagatcagctggagccaggttgatggtgatttttttcgccggatattcatatccgctattgataatggcgctgcgcacgcgatcgcgagcttcttttaccgttgtttctggtaagcccaccatcgttaagccgggtagacctttactgatatgtacctcaacagtgatcgggggcgcatttactcccagggctgcgcgggtatgaacaatactcagactcataagccctccttgagtcaccattatgtgcataagatatcgctgctgtagcccgctaattcgtgaattttagtggctgattcctgtttatttgtgcaagtgaagttgagttgttctggcggtggaatgatgctcgcaaaaatgcagcggacaaaggatgaactacgaggaagggaacaacattcatactgaaattgaatttttttcactcactattttatttttaaaaaacaacaatttatattgaaattattaaacgcatcataaaaatcggccaaaaaatatcttgtactatttacaaaacctatggtaactctttaggcattccttcgaacaagatgcaagaaaagacaaaatgacagcccttctacgagtgattagcctggtcgtgattagcgtggtggtgattattatcccaccgtgcggggctgcacttggacgaggaaaggcttaaagatcaagccttaacgaactaagacccccgcaccgaaaggtccgggggttttttttgaccttaaaaacataaccgaggagcagacaatgaataacagcacaaaattctgtttctcaagattcaggacggggaactaactatgaatggcgcacagtgggtggtacatgcgttgcgggcacagggtgtgaacaccgttttcggttatccgggtggcgcaattatgccggtttacgatgcattgtatgacggcggcgtggagcacttgctatgccgacatgagcagggtgcggcaatggcggctatcggttatgctcgtgctaccggcaaaactggcgtatgtatcgccacgtctggtccgggcgcaaccaacctgataaccgggcttgcggacgcactgttagattccatccctgttgttgccatcaccggtcaagtgtccgcaccgtttatcggcactgacgcatttcaggaagtggatgtcctgggattgtcgttagcctgtaccaagcacagctttctggtgcagtcgctggaagagttgccgcgcatcatggctgaagcattcgacgttgcctgctcaggtcgtcctggtccggttctggtcgatatcccaaaagatatccagttagccagcggtgacctggaaccgtggttcaccaccgttgaaaacgaagtgactttcccacatgccgaagttgagcaagcgcgccagatgctggcaaaagcgcaaaaaccgatgctgtacgttggcggtggcgtgggtatggcgcaggcagttccggctttgcgtgaatttctcgctgccacaaaaatgcctgccacctgtacgctgaaagggctgggcgcagtagaagcagattatccgtactatctgggcatgctggggatgcacggcaccaaagcggcaaacttcgcggtgcaggagtgtgacctgctgatcgccgtgggcgcacgttttgatgaccgggtgaccggcaaactgaacaccttcgcgccacacgccagtgttatccatatggatatcgacccggcagaaatgaacaagctgcgtcaggcacatgtggcattacaaggtgatttaaatgctctgttaccagcattacagcagccgttaaatcaatgactggcagcaacactgcgcgcagctgcgtgatgaacattcctggcgttacgaccatcccggtgacgctatctacgcgccgttgttgttaaaacaactgtcggatcgtaaacctgcggattgcgtcgtgaccacagatgtggggcagcaccagatgtgggctgcgcagcacatcgcccacactcgcccggaaaatttcatcacctccagcggtttaggtaccatgggttttggtttaccggcggcggttggcgcacaagtcgcgcgaccgaacgataccgttgtctgtatctccggtgacggctctttcatgatgaatgtgcaagagctgggcaccgtaaaacgcaagcagttaccgttgaaaatcgtcttactcgataaccaacggttagggatggttcgacaatggcagcaactgttttttcaggaacgatacagcgaaaccacccttactgataaccccgatttcctcatgttagccagcgccttcggcatccatggccaacacatcacccggaaagaccaggttgaagcggcactcgacaccatgctgaacagtgatgggccatacctgcttcatgtctcaatcgacgaacttgagaacgtctggccgctggtgccgcctggcgccagtaattcagaaatgttggagaaattatcatgatgcaacatcaggtcaatgtaagcgctcgcttcaatccagaaaccttagaacgtgttttacgcgtggtgcgtcatcgtggtttccacgtctgcagtatgaatatggccgccgccagcgatgcacaaaatataaatatcgaattgaccgttgccagcccacggagcgtcgacttactgtttagtcagttaaataaactggtggacgtcgcacacgttgccatctgccagagcacaaccacaagtcaacaaatccgcgcctgagcgcaaaaggaatataaaaatgaccacgaagaaagctgattacatttggttcaatggggagatggttcgctgggaagacgcgaaggtgcatgtgatgagccacgcgctgcactatggcactagcgtttttgaaggcatccgttgctacgacagccacaaaggaccggttgtattccgccatcgtgagcatatgcagcgtctgcatgactccgccaaaatctatcgcttcccggttagccagagcattgatgagctgatggaagcttgtcgtgacgtgatccgcaaaaacaatctcaccagcgcctatatccgtccgctgatcttcgtcggtgatgttggcatgggagtaaacccgccagcgggatacagtaccgacgtgattatcgctgctttcccgtggggagcgtatctgggcgcagaagcgctggagcaggggatcgatgcgatggtttcctcctggaaccgcgcagcaccaaacaccatcccgacggcggcaaaagccggtggtaactacctctcttccctgctggtgggtagcgaagcgcgccgccacggttatcaggaaggtatcgcgctggatgtgaacggttatatctctgaaggcgcaggcgaaaacctgtttgaagtgaaagatggtgtgctgttcaccccaccgttcacctcctccgcgctgccgggtattacccgtgatgccatcatcaaactggcgaaagagctgggaattgaagtacgtgagcaggtgctgagccgcgaatccctgtacctggcggatgaagtgtttatgtccggtacggcggcagaaatcacgccagtgcgcagcgtagacggtattcaggttggcgaaggccgttgtggcccggttaccaaacgcattcagcaagccttcttcggcctcttcactggcgaaaccgaagataaatggggctggttagatcaagttaatcaataaatacaaaaaatgggacggcacgcaccgtcccatttacgagacagacactgggagtaaataaagtatgcctaagtaccgttccgccaccaccactcatggtcgtaatatggcgggtgctcgtgcgctgtggcgcgccaccggaatgaccgacgccgatttcggtaagccgattatcgcggttgtgaacagcttcacccaatttgtaccgggtcacgtccatctgcgcgatctcggtaaactggtcgccgaacaaattgaagcggctggcggcgttgccaaagagttcaacaccattgcggtggatgatgggattgccatgggccacggggggatgctttatagtctgccatctcgcgaactgatcgctgattccgttgagtatatggtcaacgcccactgcgccgacgccatggtctgcatctctaactgcgacaaaatcaccccggggatgctgatggcttccctgcgcctgaatattccggtgatctttgtttccggcggcccgatggaggccgggaaaaccaaactttccgatcagatcatcaagctcgatctggttgatgcgatgatccagggcgcagacccgaaagtatctgactcccagagcgatcaggttgaacgttccgcgtgtccgacctgcggttcctgctccgggatgtttaccgctaacagtatgaactgcctgaccgaagcgctgggcctgagccagccgggcaacggcagcctgctggcaacccacgccgaccgtaagcagctgttccttaatgctggtaaacgcattgttgaattgaccaaacgttattacgagcaaaacgacgaaagtgcactgccgcgtaatatcgccagtaaggcggcgtttgaaaacgccatgacgctggatatcgcgatgggtggaagcactaacaccgtacttcacctgctggcggcggcgcaggaagcggaaatcgacttcaccatgagtgatatcgataagctttcccgcaaggttccacagctgtgtaaagttgcgccgagcacccagaaataccatatggaagatgttcaccgtgctggtggtgttatcggtattctcggcgaactggatcgcgcggggttactgaaccgtgatgtgaaaaacgtacttggcctgacgttgccgcaaacgctggaacaatacgacgttatgctgacccaggatgacgcggtaaaaaatatgttccgcgcaggtcctgcaggcattcgtaccacacaggcattcagccaagattgccgttgggatacgctggacgacgatcgcgccaatggctgtatccgcagcctggaacacgcctacagcaaagacggcggcctggcggtgctctacggtaactttgcggaaaacggctgcatcgtgaaaacggcaggcgtcgatgacagcatcctcaaattcaccggcccggcgaaagtgtacgaaagccaggacgatgcggtagaagcgattctcggcggtaaagttgtcgccggagatgtggtagtaattcgctatgaaggcccgaaaggcggtccggggatgcaggaaatgctctacccaaccagcttcctgaaaagtatgggtctcggcaaagcctgtgcgctgatcaccgacggtcgtttctctggtggcacctctggtctttccatcggccacgtcagtccggaagcggcaagcggcggcagcattggcctgattgaagatggtgacctgatcgctatcgacatcccgaaccgtggcattcagttacaggtaagcgatgccgaactggcggcgcgtcgtgaagcgcaggacgctcgaggtgacaaagcctggacgccgaaaaatcgtgaacgtcaggtctcctttgccctgcgtgcttatgccagcctggcaaccagcgccgacaaaggcgcggtgcgcgataaaagcaaactggggggttaataatggctgacagccaacccctgtccggtgctccggaaggtgccgaatatttaagagcagtgctgcgcgcgccggtttacgaggcggcgcaggttacgccgctacaaaaaatggaaaaactgagcagccgtcttgataacgtcattctggtgaagcgcgaagatcgccagccagtgcacagctttaagctgcgcggcgcatacgccatgatggcgggcctgacggaagaacagaaagcgcacggcgtgatcactgcttctgcgggtaaccacgcgcagggcgtcgcgttttcttctgcgcggttaggcgtgaaggccctgatcgttatgccaaccgccaccgccgacatcaaagtcgacgcggtgcgcggcttcggcggcgaagtgctgctccacggcgcgaactttgatgaagcgaaagccaaagcgatcgaactgagtcagcagcaggggttcacctgggtgccgccgttcgaccatccgatggtgattgccgggcaaggcacgctggcgctggaactgctccagcaggacgcccatctcgaccgcgtatttgtgccagtcggcggcggcggtctggctgctggcgtggcggtgctgatcaaacaactgatgccgcaaatcaaagtgatcgccgtagaagcggaagactccgcctgcctgaaagcagcgctggatgcgggtcatccggttgatctgccgcgcgtagggctatttgctgaaggcgtagcggtaaaacgcatcggtgacgaaaccttccgtttatgccaggagtatctcgacgacatcatcaccgtcgatagcgatgcgatctgtgcggcgatgaaggatttattcgaagatgtgcgcgcggtggcggaaccctctggcgcgctggcgctggcgggaatgaaaaaatatatcgccctgcacaacattcgcggcgaacggctggcgcatattctttccggtgccaacgtgaacttccacggcctgcgctacgtcagtgaacgctgcgaactgggcgaacagcgtgaagcgttgttggcggtgaccattccggaagaaaaaggcagcttcctcaaattctgccaactgcttggcgggcgtagcgtcaccgagttcaactaccgttttgccgatgccaaaaacgcctgcatctttgtcggtgtgcgcctgagccgcggcctcgaagagcgcaaagaaattttgcagatgctcaacgacggcggctacagcgtggttgatctctccgacgacgaaatggcgaagctacacgtgcgctatatggtcggcggacgtccaagccatccgttgcaggaacgcctctacagcttcgaattcccggaaagtccgggcgcgctgctgcgcttcctcaacacgctgggtacgtactggaacatttctttgttccactatcgcagccatggcaccgactacgggcgcgtactggcggcgttcgaacttggcgaccatgaaccggatttcgaaacccggctgaatgagctgggctacgattgccacgacgaaaccaataacccggcgttcaggttctttttggcgggttaaggaaaaatgcctgatagcgcttcgcttatcaggcctacccgcgcgacaacgtcatttgtggttcggcaaaatcttccagaatgcctcaattagcggctcatgtagccgctttttctgcgcacacacgcccagctcaaacggcgttttctcatcgctgcgctctaaaatcatcacgcggttacgcaccggttcggggctgttttccagcaccacttccggcaacaatgccacgccacagccgagtgccaccatgcttaccatcgcttcatgcccgccaaccgtggcgtaaatcatcgggttactgattttattgcgtcgaaaccacagttcaatgcggcggcgtaccggcccctgatcggccataataaacggcaccgtactccagtccggcttctctacgctcacctgattacgcaccgggcagggcagcgcgggggcaatcagcactactgccagattctccagcatgctaaacgccactgcgccgggcaaggtttccggtttacccgcaatcgccagatccgcttcaccagtgaccaccttttccatcgcatctgccgcatcaccagtagtaagtttaatctccacgctcgggtgttccgcgcggaagcgatccagaatcggcggcagatggctgtaggcagcggtcacgctgcagaagatatgtaattcgccagagaggctcggcccttgctgatcgatggtgtggcgcaactgctgatactgcaacagcgtttgctgggcgaaaacgcgcagctcttcgcccgcttcagtcagcgtcaccgtgcggttatcgcgcacaaacagcggctgaccgagatcttcttccaggcgctgaatctgccgactgagcgtggatgggctaacgtgcatcgcccgcgcgctgcggccaaaatggcggctttccgccagatgcaggaaggttttcagatcgcgtaaatccacagggacagccctcgatgttgacgttgcaaaaattgcaatgtgacgttgtgaatatatcaatttccgcaataaatttcctgtcatatagtgaattcaatctcgcaaacgcgaaccgaacaataagaagcacaacatcacgaggaatcaccatggctaactacttcaatacactgaatctgcgccagcagctggcacagctgggcaaatgtcgctttatgggccgcgatgaattcgccgatggcgcgagctaccttcagggtaaaaaagtagtcatcgtcggctgtggcgcacagggtctgaaccagggcctgaacatgcgtgattctggtctcgatatctcctacgctctgcgtaaagaagcgattgccgagaagcgcgcgtcctggcgtaaagcgaccgaaaatggttttaaagtgggtacttacgaagaactgatcccacaggcggatctggtgattaacctgacgccggacaagcagcactctgatgtagtgcgcaccgtacagccactgatgaaagacggcgcggcgctgggctacagccacggtttcaacatcgtcgaagtgggcgagcagatccgtaaagatatcaccgtagtgatggttgcgccgaaatgcccaggcaccgaagtgcgtgaagagtacaaacgtgggttcggcgtaccgacgctgattgccgttcacccggaaaacgatccgaaaggcgaaggcatggcgattgccaaagcctgggcggctgcaaccggtggtcaccgtgcgggtgtgctggaaagctccttcgttgcggaagtgaaatctgacctgatgggcgagcaaaccatcctgtgcggtatgttgcaggctggctctctgctgtgcttcgacaagctggtggaagaaggtaccgatccagcatacgcagaaaaactgattcagttcggttgggaaaccatcaccgaagcactgaaacagggcggcatcaccctgatgatggaccgtctctctaacccggcgaaactgcgtgcttatgcgctttctgaacagctgaaagagatcatggcacccctgttccagaaacatatggacgacatcatctccggcgaattctcttccggtatgatggcggactgggccaacgatgataagaaactgctgacctggcgtgaagagaccggcaaaaccgcgtttgaaaccgcgccgcagtatgaaggcaaaatcggcgagcaggagtacttcgataaaggcgtactgatgattgcgatggtgaaagcgggcgttgaactggcgttcgaaaccatggtcgattccggcatcattgaagagtctgcatattatgaaagtctgcacgagctgccgctgattgccaacaccatcgcccgtaagcgtctgtacgaaatgaacgtggttatctctgataccgctgagtacggtaactatctgttctcttacgcttgtgtgccgttgctgaaaccgtttatggcagagctgcaaccgggcgacctgggtaaagctattccggaaggcgcggtagataacgggcaactgcgtgatgtgaacgaagcgattcgcagccatgcgattgagcaggtaggtaagaaactgcgcggctatatgacagatatgaaacgtattgctgttgcgggttaagtgcgcgctgatgccctcaccccgaccctctcccacagggagagggagaaaacactcaaggccttctcctggagaaggccttgctattagttgcggtacagcaccttaatgatgtgatatccgaactgggtgtgcagcgggccggtcggctccagtaccggacaagagaaaaccactttatcgaacgccggaaccatctgaccctggcggaattcacctaaatcaccgccgcgtttgccacttgggcaaatggagtgtttcttcgccagcttgccgaaatcggccccgttcttaatctgctcgagaagatccagagccagtttctcttcttttacaaggatatgcagtgctgctgctgtttttgccatgatcgtgccttgagtgaataattgtcaggcggcgattttagcatgatccgcagatgctaacgtaattgtcagtcagggagtggctggtacatatatggcaaaagcccggaaaatccgggcttcgcaggtccctcaaggggagaaaacttagggcctctatgggctacaaagtcattatcggggatggttattttattgtcaatttatgaggcttatggcattgatactcttgatgaccgccctctgtatgtctgcaaccaactcatgtggcaaacattgattaagataccctctgtaagtccttgctctgtttaatctgtttcgactgacttgttgtaccaggtcggctttggcccaacgaatctgctgatcaaagaattgcaggtcattgataacattactggctatttcaacatgcattccacgttttaacttgtctggtcggctgtggttgataatggaacgacgatgcatgcgttgccattaatttttccgttgagcacgacaactaacctgttttttatcatttcaggaggaatgcggccatcgtaatacgtcgtgctgaacggtccattttggctaacaggatagttaccaaagttgcattccagtatttcaccaaccttagggctgaaattaatcgccacgagtaaacctctccttagtaaactctgaaaaagtaataacacaacgttacgacccgatattttctaagtctaatggattcacgatgaactccgatttcggtcttctctctctgatttaaacatccgcagccaaccggttagcggcttacacgcggtcacattcaaatgcgattctgctacaatcctccccccgttcgaagattgagcaatacacctatgcgtctaaaccccggccaacaacaagctgtcgaattcgttaccggcccctgcctggtgctggcgggcgcgggttccggtaaaactcgtgttatcaccaataaaatcgcccatctgatccgcggttgcggttatcaggcgcggcacattgcggcggtgacctttactaataaagcagcgcgcgagatgaaagagcgtgtagggcagacgctggggcgcaaagaggcgcgtgggctgatgatctccactttccatacgttggggctggatatcatcaaacgcgagtatgcggcgcttgggatgaaagcgaacttcagcttgtttgacgataccgatcagcttgctttgcttaaagagttgaccgaggggctgattgaagatgacaaagttctcctgcaacaactgattagcaccatctctaactggaagaatgatctcaaaacaccgtcccaggcggcagcaagtgcgattggcgagcgggaccgtatttttgcccattgttatgggctgtatgatgcacacctgaaagcctgtaacgttctcgacttcgatgatctgattttattgccgacgttgctgctgcaacgcaatgaagaagtccgcaagcgctggcagaacaaaattcgctatctgctggtggatgagtatcaggacaccaacaccagccagtatgagctggtgaaactgctggtgggcagccgcgcgcgctttaccgtggtgggtgacgatgaccagagcatctactcctggcgcggtgcacgtccgcaaaacctggtgctgctgagtcaggattttccggcgctgaaggtgattaagcttgagcagaactatcgctcttccgggcgtattctgaaagcggcgaacatcctgatcgccaataacccgcacgtctttgaaaagcgtctgttctccgaactgggttatggcgcggagctaaaagtattaagcgcgaataacgaagaacatgaggctgagcgcgttactggcgagctgatcgcccatcacttcgtcaataaaacgcagtacaaagattacgccattctttatcgcggtaaccatcagagccgggtgtttgaaaaattcctgatgcaaaaccgcatcccgtacaaaatatctggtggtacgagctttttctctcgtcctgaaatcaaggacttgctggcttatctgcgcgtgctgactaacccggacgatgacagcgcatttctgcgtatcgttaacacgccgaagcgagagattggcccggctacgctgaaaaagctgggtgagtgggcgatgacgcgcaataaaagcatgtttaccgccagctttgatatgggcctgagtcagacgcttagcggacgtggttatgaagcattgacccgcttcactcactggttggcagaaatccagcgtctggcggagcgggagccgattgccgcggtgcgtgatctgatccatggcatggattatgaatcctggctgtacgaaacaagccccagcccgaaagccgccgaaatgcgcatgaagaacgtcaaccaactgtttagctggatgacggagatgctggaaggcagtgaactggatgagccgatgacgctcacccaggtggtgacgcgctttactttgcgcgacatgatggagcgtggtgagagtgaagaagagctggatcaggtgcaactgatgactctccacgcgagcaaagggctggagtttccttatgtctacatggtcggtatggaagaagggtttttgccgcaccagagcagcatcgatgaagataatatcgatgaggagcggcggctggcctatgtcggcattacccgcgcccagaaggaattgacctttacgctgtgtaaagaacgccgtcagtacggcgaactggtgcgcccggagccgagccgctttttgctggagctgccgcaggatgatctgatttgggaacaggagcgcaaagtggtcagcgccgaagaacggatgcagaaagggcaaagccatctggcgaatctgaaagcgatgatggcggcaaaacgagggaaataatcaaggccggaaaagatgcgtcagcatcgcatccggcacttactcattaatgcacttccagcggccagtggacatagctctgccactggctttcctgagcaataatctctttacccagcggatgttgggttagccaaccttgcggaagcgtcaaggtcaacagttcatggttagcctgtaatgtcatctctggcacgagatcgtcacggcgacggctggcaaaaatgatggccaggcgtagtaaacggcagagttgttctgcgacgcgcggcggtacggcattttgctgatgcaggctactgagatcgaccggattagtctggttgagcagtagcgtcgccagcaattttttctgtgcgggggtaaaaccgggaagatccagattacgcaccagataagcagcgtgttgcggcgcttgtttgaagtcaacgctcaggccgatttcatgaagctgacaggcgctgatgagcaaatcgcggcttattgcttcaagatgccattcgttttccacctgatcgaagaagttagccgcaactttggctacgcgctgtgcctgatcaatatcgatcataaagcggcgttgaatattacgcagcgtacggctgcgaatatcctgctcgacggccagatgcaacatgccgtagaccaggccttcacgcagcgcaccgcccgccagggtcatacactgaatattcagttcggtaaaaatggcgatcaggatcgccagaccactcgggaacactaacgcacgttccagcgtcagcccgtcaatctccagttcctccagccgaccgcaatgaatggctcgctgtttcaattgctgcaacttttccagggtaatgcgttcatccatcccctgtgccatcatgatttcctgtaacgcctgcacggtgccggaagcaccaacgcacactttccagccgtgataccgtaattcatcggcaaccggacgtaacacttcgcgtgccgctttttctgcagcatcaaaattttcctgccccagattacgatcggcaaaatagcgttccagccaggtgacgcagcccatgctcaggctgaacaagctggtggtttgtgcacccgtgccggttaccagttcagtactggctccgcctatatccaccaccaggcgctgatcggcaccaccagtggtgtgagcaacgccctgataaatcagacgtgcttcctcttcaccgctgatcacctgtaccggacaaccgagaatttcctgcgctttggcaataaaatcacccgcattgacggcaaggcgtaacgtcgccgtagcgacaacgcgaatttggctgggaggaatatcttgcagacgttcagcaaacaggcgcaaacattgccaaccgcgctccattgcttcattggagagggcattttcgctattcaggccagcagccagacgcactttgcgttttattcgcgtcagcgtctggatgcttccagccacctcgcgcacaaccagcatatgaaaactattgctaccgagatcaatggctgcatacaggctgctggtggaacccatactcttcatccttcaatctgtctctgtgttggctgcattctttcacctgaatcacttactacagtaagctcatcgggattcattctcttgccatcttgatacagtttgaatgattttgagtatgacattttttatttaaccactacgacgacgattacgcggagcgccagtacgacgcggaccattgcctgtgcgcgggcgcgtgaggcgcagcggttttggcagatcggtcatcaatgcgtccggattgtatttgcttaccggaatactgtgaccaatataggtctcaatagcaggcaaattcaatgcatactcttcacacgccaggctgatagagtgaccgcttgcgcctgcgcgacctgtacgaccaatacggtgaacgtaatcttcacagtcatcgggtaaatcgtagttaaagacgtgcgtcactgccggaatatgcaaaccacgcgcggcaacgtcggtggcaaccagaatatccagatcgccacgggtaaattcatcaagaatacgcagacgttttttctgcgcgacatcgcctgtcaataaaccgacacgatgaccatctgctgccaggtggccccagatctcttcacaacggtgtttggtgttggcgaaaataatcgctctgtctggccactcttcttcgatcagcgtttgcagcaaacgcattttttcttcgttagaagggtagaaaagctcttctttaatacggtggcccgttttctgttccggttccacttcaatatattcggcattgttcatctgctcgaacgccagttcacgtacccggtagctaagcgtggcggagaacagcatgttgaggcgctggtttgcaggcggcatacggcggaacagccagcggatatctttaataaagcccagatcgtacatgcgatcggcttcgtccagtaccaccacctgaatggcaccgaggttaatgtggttctgcttggcgtagtcaattaaacgccccgtggtgccaatcagaatgtcaacgccgctttccagcactttcagctgtttgtcgtagccatcaccaccgtaagccagacccagcttcaggccagtagcttccgccagcggttctgcgtcggcatggatctgcacggcaagttcacgcgtcggtgccataattaaggcacgcggctgattcaccttgcgatcggcaatcgcaggatgagagagaagataatgaaacgtactcgtaagaaacgccatcgttttcccggtaccggtttgcgcctgcccggctacgtcacgacccgccagcgtcagcggaagggccagtgcctgaatgggcgtacagttatgaaacccttttttttcaagggcttctacaaccttcggatgcagggcgaagtcggaaaacttctgttctgttaaatgtgttttgctcatagtgtggtagaatatcagcttactattgctttacgaaagcgtatccggtgaaataaagtcaacctttagttggttaatgttacaccaacaacgaaaccaacacgccaggcttattcctgtggagttatatatgagcgataaaattattcacctgactgacgacagttttgacacggatgtactcaaagcggacggggcgatcctcgtcgatttctgggcagagtggtgcggtccgtgcaaaatgatcgccccgattctggatgaaatcgctgacgaatatcagggcaaactgaccgttgcaaaactgaacatcgatcaaaaccctggcactgcgccgaaatatggcatccgtggtatcccgactctgctgctgttcaaaaacggtgaagtggcggcaaccaaagtgggtgcactgtctaaaggtcagttgaaagagttcctcgacgctaacctggcgtaagggaatttcatgttcgggtgccccgtcgctaaaaactggacgcccggcgtgagtcatgctaacttagtgttgacttcgtattaaacataccttattaagtttgaatcttgtaatttccaacgcttcccgttttatcttaaatgcgaagtgaacagatttctggcagcagtctcaatccgtcttgtcgtttcagttctgcgtactctcctgtgaccaggcagcgaaaagacatgagtcgatgaccgtaaacaggcatggatgatcctgccataccattcacaacattaagttcgagatttaccccaagtttaagaactcacaccactatgaatcttaccgaattaaagaatacgccggtttctgagctgatcactctcggcgaaaatatggggctggaaaacctggctcgtatgcgtaagcaggacattatttttgccatcctgaagcagcacgcaaagagtggcgaagatatctttggtgatggcgtactggagatattgcaggatggatttggtttcctccgttccgcagacagctcctacctcgccggtcctgatgacatctacgtttcccctagccaaatccgccgtttcaacctccgcactggtgataccatctctggtaagattcgcccgccgaaagaaggtgaacgctattttgcgctgctgaaagttaacgaagttaacttcgacaaacctgaaaacgcccgcaacaaaatcctctttgagaacttaaccccgctgcacgcaaactctcgtctgcgtatggaacgtggtaacggttctactgaagatttaactgctcgcgtactggatctggcaagtcctatcggtcgtggtcagcgtggtctgattgtggcaccgccgaaagccggtaaaaccatgctgctgcagaacattgctcagagcattgcttacaaccacccggattgtgtgctgatggttctgctgatcgacgaacgtccggaagaagtaaccgagatgcagcgtctggtaaaaggtgaagttgttgcttctacctttgacgaacccgcatctcgccacgttcaggttgcggaaatggtgatcgagaaggccaaacgcctggttgagcacaagaaagacgttatcattctgctcgactccatcactcgtctggcgcgcgcttacaacaccgttgttccggcgagtggtaaagtgttgaccggtggtgtggatgccaacgccctgcatcgtccgaaacgcttctttggtgcggcgcgtaacgtggaagagggcggcagcctgaccattatcgcgacggcgcttatcgataccggttctaaaatggacgaagttatctacgaagagtttaaaggtacaggcaacatggaactgcacctctctcgtaagatcgctgaaaaacgcgtcttcccggctatcgactacaaccgttctggtacccgtaaagaagagctgctcacgactcaggaagaactgcagaaaatgtggatcctgcgcaaaatcattcacccgatgggcgaaatcgatgcaatggaattcctcattaataaactggcaatgaccaagaccaatgacgatttcttcgaaatgatgaaacgcagttaaatttgtcttatgccaaaaacgccacgtgtttacgtggcgttttgcttttatatctgtaatcttaatgccgcgctggcgatgttaggaaaattcctggaatttgctggcatgttatgcaatttgcatatcaaatggttaatttttgcacaggactggtgggtttggaacggactttcccttctgaataaaggtcttcgtggttatacttctgctaataattttctctgagagcatgcattgtgaatttactgacagtgagtactgatctcatcagtatttttttattcacgacactgtttctgttttttgcccgtaaggtggcaaaaaaagtcggtttagtggataaaccaaacttccgcaaacgtcaccagggattgatacctctcgttggggggattagcgtttacgcagggatttgcttcacgttcggaattgtcgattactatattccgcatgcatctctctatctcgcttgtgccggtgtgcttgttttcattggcgcgctggatgaccgttttgatatcagcgtaaaaatccgtgccaccatacaggccgctgttggcattgttatgatggtgttcggcaagctttatctcagtagcctgggttatatctttggctcctgggagatggtgctcggaccgtttggttacttcctgacgctatttgccgtctgggcggccattaatgcgttcaacatggttgatggcattgatggcttgctgggcgggttgtcctgcgtcagctttgcagcaatcggtatgattttgtggttcgacgggcaaaccagcctcgcaatctggtgctttgcgatgatcgccgccatcctgccatacatcatgcttaaccttggtatcctgggtcgccgctacaaagtctttatgggtgatgcgggcagtacgctgattggttttaccgttatctggatcctgctcgaaacgacccagggcaaaacccatcccatcagcccggttaccgctttgtggataatcgccattccgctaatggatatggtggcgattatgtaccgtcgcctgcgtaaaggcatgagcccattctctcctgaccgtcagcatattcaccatttgatcatgcgtgccgggtttacttcccgtcaggcgtttgtgctgattacccttgccgcagcactgctcgcttccattggcgtgctggcagaatattctcattttgtcccggagtgggtcatgctggtgctctttttgctagcattcttcctctatggatattgcattaagcgtgcctggaaagttgctcgctttattaagcgcgtaaaacgcagactgcgtagaaatcgtggtggcagccccaatttaaccaaataaatgaggatgtgatgacacaaccaatgcctgggaaaccggccgaagacgctgaaaatgaactggatattcgtgggttgtttcgtaccttgtgggctgggaagctatggattattggcatggggctggcgtttgcgttaatcgcgctggcgtatacgttttttgctcgtcaggagtggagcagcacggcgattaccgatcgtccaacggtgaatatgctggggggatattacagccagcagcaatttttgcgtaacctggatgtccgtagtaacatggcttctgccgaccaaccaagcgtcatggacgaagcctataaagagtttgttatgcaactggccagctgggatacccgcagagagttctggctgcaaaccgactattacaaacagcggatggtgggcaacagcaaagccgatgcggcgttgctggatgaaatgattaacaacatccagtttatccccggagactttacccgcgcggtcaatgacagcgtgaagcttattgccgaaaccgcgcctgacgctaataacctgttacgtcagtatgttgcttttgccagccagcgtgcagccagccatctgaatgatgagctgaaaggcgcatgggcggcgcgtaccatccagatgaaagctcaggtgaagcgtcaggaagaggtggcgaaagccatctacgaccgccggatgaacagcattgagcaggcgctgaaaattgctgagcagcataatattagccgcagtgcgacagatgtacctgccgaggaattacctgatagtgaaatgttcctgcttgggcgtccaatgcttcaggctcgactggaaaatttacaggccgtcggtccggcctttgatctcgactatgatcagaatcgggccatgttaaacaccctgaatgttggtccaaccctggatccgcgttttcagacctatcgctatttgcgtacgccggaagaaccggtaaaacgcgatagcccacgtcgtgccttcctgatgattatgtggggcattgtcggggggctgatcggggctggtgtcgcattaacccgccgttgcagcaaataacaacactgctgcggtgagcgcaaaggcgctcgccgcttattcgaagagaatcgatgtgaaagtactgactgtatttggtacgcgcccggaagccatcaagatggcgccgttggtgcatgcgttggcaaaagatcctttttttgaggctaaagtttgcgtcactgcgcagcatcgggagatgctcgatcaggtgctgaaactcttttccattgtacctgactacgatctcaacataatgcagccaggacagggcctgacagagataacctgtcggattctggaagggctaaaacctattcttgccgagttcaaaccagacgtcgtgctggttcacggcgatacgacgacgacgctggcaaccagcctggcggcgttttatcagcgtattcctgttggtcacgttgaggctggtctgcgcacgggcgatctctatagcccgtggccggaagaggctaaccgtacattgaccgggcatctggcgatgtatcacttctctccaaccgaaacttcccggcaaaacttgctgcgtgaaaacgttgcggatagccgaatcttcattaccggtaatacagtcattgatgcactgttatgggtgcgtgaccaggtgatgagcagcgacaagctgcgtagtgaactggcggcaaattacccgtttatcgaccccgataaaaagatgattctggtgaccggtcacaggcgtgagagtttcggtcgtggctttgaagaaatctgccacgcgctggcagacatcgccaccacgcaccaggacatccagattgtctatccggtgcatctcaacccgaacgtcagagaaccggtcaatcgcattctggggcatgtgaaaaatgtcattctgatcgatccccaggagtatttaccgtttgtctggctgatgaaccacgcctggctgattttgaccgacagtggcggcattcaggaagaagcgcctagcctggggaaacctgtgctggtgatgcgcgataccactgagcgtccggaagcggtgacggcgggtacggtgcgtctggtaggcacggataagcagcgaattgtcgaggaagtgacgcgtcttttaaaagacgaaaacgaatatcaagctatgagccgcgcccataacccgtatggtgatggtcaggcatgctctcgcattctggaagcgttaaaaaataatcggataagtctatgagttttgcgaccatttctgttatcggactgggttatatcgggctgccaacggcagcagcgtttgccagtcggcaaaaacaggtaattggtgtcgatatcaaccaacatgcggttgataccatcaatcgtggcgaaatccatatcgtcgaacctgatttggcgagtgtagtaaaaactgccgtagaaggcggttttttacgagcgagcacgacgccagttgaagcggatgcctggctgattgctgtacccacgccgtttaagggcgatcatgagccagatatgacctacgttgaaagcgctgctcgctccattgcgccagtgctgaaaaaaggcgcgctggtgatccttgaatccaccagcccggtggggagtaccgagaagatggcagaatggttagcagagatgcgtccggatctcactttcccgcagcaggtgggcgagcaggcggacgtcaacattgcttactgcccggaacgcgtgttaccaggacaggtaatggtcgagctgattaaaaacgatcgcgtgattggtggtatgacgccggtttgtagcgcccgcgccagcgaactgtacaaaattttcctcgaaggtgagtgtgtcgtcactaacagccggacggcggaaatgtgtaagctcaccgaaaacagcttccgcgatgtgaatatcgcttttgctaatgaattgagcctgatttgtgccgatcaggggattaacgtctgggaactgattcgcctggcgaatcgtcaccctcgcgttaatattcttcagcctggccctggcgtgggcggtcactgcattgctgttgatccgtggtttatcgtggcacagaacccccagcaggcgcggcttatccgtaccgcgcgcgaagtgaacgatcacaaaccgttctgggttatcgatcaggtgaaagcggcggtggctgattgcctggcggctaccgataaacgcgccagtgaactgaaaatcgcctgctttggtctggcgtttaaaccgaatattgatgacctgcgcgaaagcccggcgatggaaatcgctgaactgatcgcccagtggcatagcggcgaaactctggttgttgagcctaacatccaccagttgccgaaaaaactgaccgggctttgtactctggcgcagcttgacgaggcgctggcaacggcagacgtgctggtgatgctggtcgatcatagtcagttcaaagttatcaatggcgacaatgtccatcagcagtatgtcgtcgatgccaaaggagtctggcgctgatgagaaaaattctgataacaggtggtgccgggtttattggcagcgcgctggtgcgttatatcatcaacgaaacgagcgacgcggtggtagtggtcgataagctgacctacgccggaaacctgatgagcctggcaccggtcgcgcaaagcgagcgctttgcctttgagaaagttgatatctgcgatcgggcagaactggcacgcgtattcactgagcatcagccagactgtgtcatgcatctggcagccgaaagccatgttgaccgttctattgacggcccggcagcgtttattgaaaccaacattgtcgggacttatacattgcttgaagcggcgcgggcttactggaatgcgctgacggaagataaaaaaagtgcgttccgttttcatcatatctccactgacgaagtatatggtgacctgcacagcacggatgatttcttcaccgaaaccacgccgtatgcgccgagcagcccttattccgcgagtaaagccagcagcgaccatctggtgcgcgcctggctgcggacctatggtctgccgacgcttatcaccaactgcagcaataactacggcccttaccactttccggaaaaactgatcccgctgatgatcctcaacgcgctggcgggtaaaagcctgccggtatatggcaacgggcagcaaatccgtgactggctgtatgtggaagatcacgcccgcgcgctgtattgcgtggcgaccaccgggaaagtcggtgaaacctataatattggtggtcacaacgagcgtaagaatctcgatgttgtggaaaccatttgcgagctgctggaagaactggctccgaacaagccgcacggcgtggcgcactatcgtgacctgatcacctttgtcgctgaccgtccggggcatgatctgcgttatgccattgatgctagcaaaattgcccgtgaacttggctggctgccgcaggaaacctttgaaagtggaatgcgtaaaacggttcagtggtatctggctaatgaaagctggtggaagcaggtgcaggacggcagctatcagggcgagcgtttaggtctgaaaggctaattttcagcggaggcaaacatgaaaggtattatcctggcgggcggttccggcacccgattgcatccgattacgcgcggcgtaagcaagcaactgttgccgatttacgataagccaatgatttactatccgctgagcgtgctgatgctggccggtatccgcgaaattctcatcatcactacgccggaagataaaggttatttccagcgcctgctgggcgatggtagtgagttcggtatccagctggaatatgccgaacagcccagcccggacggtctggcgcaggcctttatcatcggtgaaaccttccttaatggtgaaccttcttgtctggtgctgggcgataacatcttcttcggtcagggcttcagtccgaagctgcgtcatgttgcggcgcgcaccgaaggggcgacggtttttggctatcaggtgatggacccggaacgctttggcgtggtggagtttgacgacaatttccgcgctatcagcctggaagaaaagccaaaacagccgaagagtaactgggcggtgaccgggctttatttctacgacagtaaagtcgtggagtacgcaaagcaggtgaagccgagcgagcgtggtgaactggagattacctccatcaaccagatgtacctcgaggcgggcaacctgaccgttgaactgctcgggcgcggatttgcctggctggataccggcactcacgacagcctgattgaagccagcacctttgtacagacggtggaaaaacgccagggctttaagattgcctgcctggaagagattgcctggcgtaacggctggctcgatgacgagggtgtgaagcgtgctgccagtagtttagcgaaaactggctacggccaatatctgctggagttacttcgtgcccgtccgcgccagtattgagccactaacctgggaaaacgccttctttggtgttaacagcgccatcgtgcgcattacgtctgaagcaccgctcctgacgccagacgcgttagcgccgtggtcacgggtgcaggccaaaattgcggcaagtaatacgggtgaactggatgccctgcaacagctgggattctccctggtagaaggtgaagttgatttggcgctacccgtgaacaatgccagtgatagcggtgctgtagtggcacaagagaccgatattcccgcattacgtcagttagccagcgccgcatttgcgcaaagccgttttcgtgcgccgtggtatgcgcctgacgccagcagtcgcttttatgcacagtggattgaaaatgccgtgcgcggcacctttgatcatcaatgtctgattttacgtgcggcgtccggcgatattcgcggctatgtctctttacgggaactcaatgcgacagatgcgcgaattggcctgctggctggacgcggtgcaggtgctgagctgatgcaaacggcgctaaactgggcgtatgctcgcggtaaaacaactttgcgggtggcgacccaaatgggcaacaccgccgcgcttaaacgatacatacaaagtggtgcgaatgtagaaagcaccgcgtactggttatacaggtgatcacatgattccatttaacgcaccgccggtggtgggaaccgaactcgactatatgcagagcgcaatgggtagcggcaaactgtgtggcgatggcggttttacccgtcgctgccagcagtggctggagcaacgttttggcagcgccaaagtgttactgacgccgtcctgcaccgctagcctggagatggcggcgctgctgctcgatatccagcctggcgatgaagtgatcatgccgagctacacctttgtctccaccgccaatgcctttgtgctgcgtggcgcaaaaatcgtttttgtggatgttcgcccggacaccatgaacatcgacgaaacgctgattgaagcggcgatcaccgacaaaacgcgcgttatcgtgccggtccattacgcgggtgtggcctgcgaaatggacaccattatggcgttggcgaaaaagcataatttgtttgtggtagaagatgccgctcagggcgtgatgtccacttacaaagggcgtgcactgggaaccattggtcatattggctgctttagcttccatgaaaccaaaaactacacggcgggcggtgaaggcggcgcgacgctgattaacgataaagcgttaatcgaacgagccgagatcatccgtgaaaagggcactaaccgcagccagttcttccgtggtcaggtcgataaatatacctggcgcgatattggctccagctatttgatgtccgatctgcaagctgcatacctgtgggcgcaactggaagcagcggatcgtatcaaccagcaacgtctggcgctgtggcaaaactactacgatgcgttagcgcctctggcgaaagccgggcgtatcgagctgccgagcattcccgatggctgcgtgcagaacgcgcatatgttctacattaaactgcgggatattgatgaccggagcgcgttgattaactttctgaaagaagcggaaatcatggcggtgtttcattacattccgctgcacggttgccctgcgggggaacactttggtgagttccacggtgaagatcgctacaccaccaaagagagcgagcgcctgctgcgcctgccgctgttctacaacctgagccccgtcaatcagcgtacggtaattgcgactttgttgaactacttttcctgatatgagcttggcaaaagcgtccttgtggacggcggccagtacactggtcaagattggtgccgggttactggtcggtaagttgctggcggtgagttttggtccggcggggcttgggctggcggcaaatttccgccagttgattaccgtgctcggcgtgcttgccggggctggcatctttaacggtgtaaccaaatacgttgcccagtaccatgataatccgcaacagctgcgccgcgtggtcggcactagtagtgcgatggtacttggtttctctacgctgatggcgctggtttttgtgctggcagctgcgccaatcagccagggattgtttggtaataccgactatcaggggctggtgcgtttagtggcgctggtgcaaatggggatcgcctggggcaacctgttactggcgctgatgaaaggctttcgcgatgccgcaggtaatgcgttaagcctgattgtcggcagcttgattggcgttctcgcgtactacgtcagttaccgtttgggcggttatgaaggggcgttgctgggtctggcgctgattcccgcgctggtggtaattcctgccgccatcatgttgatcaaacgtggtgtcatcccgttaagctatctgaaacccagctgggataacggtctggcagggcagttgagcaaatttacgctcatggcgttgattacgagcgtgaccttgcctgttgcttacatcatgatgcgtaaactgctggcggcgcagtatagctgggatgaggtggggatctggcaaggggtgagcagtatttccgatgcctacctgcaatttattacggcaagcttcagcgtatatttgctgcccacgttgagccggctaacggaaaagcgcgatatcacccgggaagtggttaaaagcctgaaattcgtcttaccggcagtggcggcggcgagttttaccgtctggctgctgcgtgattttgctatctggctgctgttgagcaataaatttaccgctatgcgcgatctctttgcctggcagttagtgggtgatgtgttaaaagtgggcgcttatgtctttggttatctggtgatcgccaaagcgagtctgcggttttatattctggcggaagtcagccagttcactttattgatggtatttgcccactggctaatccctgcgcatggtgcactgggcgcggcgcaggcatatatggcaacttatatcgtctatttttctctttgttgtggcgtgtttttactctggcgtaggcgggcatgactgtactgattcacgtactgggaagcgatatccctcaccataaccgaaccgttttgcggtttttcaatgacgcgctggccgcgacgagcgagcacgcgcgcgagtttatggttgttggcaaggacgacggcttaagtgatagctgtccggcgctttctgtgcaatttttccctgggaaaaaaagcctggcggaagcggtcatcgcgaaagcaaaagctaaccgtcagcagcgttttttcttccacggtcagttcaatcccacactgtggctggctctgctgagtggtggcattaagcccagccagtttttctggcatatctggggggcagacctgtatgagctttccagtggcttgagatataagcttttttacccactacgtcgcctggcgcaaaagcgagtcggctgtgtatttgccacccgcggcgatttgagcttttttgccaaaacgcacccaaaggtgcggggcgaactgctgttcttcccgacgcggatggaccctagcctcaatacgatggcgaacgatcggcaacgtgaagggaaaatgaccattctggtggggaactccggcgaccgcagcaatgagcatattgctgccttgcgcgccgttcatcagcaatttggcgatacggtaaaagtggtggtgccgatgggatatccgcctaataacgaagcgtacattgaggaagttcgtcaggcggggctggagttattcagcgaagaaaatctacaaattctgagcgaaaaactggaatttgacgcctatctggcgctacttcgtcagtgcgatcttggttactttatttttgcccgccagcagggcattggtacgctgtgcttactgattcaggcgggcattccttgtgtgcttaaccgggaaaatccgttctggcaggatatgacggaacaacatttgccggtgctgtttactaccgacgatctcaacgaggatattgtgcgtgaagcgcagcgccagttggcgagcgtggataaaaacaccattgccttctttagccctaactatctacaaggctggcagcgggcgttggcgattgccgccagggaggtcgcatgagtctgctgcaattcagtggcctgtttgttgtctggctgctctgcacgctgtttattgccacgctgacctggtttgagtttcgccgtgtgcgctttaacttcaatgtcttctttagtttgctgtttttgctcacctttttcttcggcttcccgctgaccagcgtgctggtatttcgctttgatgttggtgtcgcgccgccagaaatcttgttgcaggcgttgctttctgcgggctgcttctacgcggtttactatgtcacctacaaaacccgcctacgcaaacgcgttgctgatgtaccgcgccgtccgctgtttaccatgaaccgcgtggagaccaatcttacgtgggtgatcctgatgggtatcgcgctggtaagcgtcggcatcttcttcatgcacaacggctttttgctgttccggcttaactcctacagtcagatcttttccagtgaagtctccggcgtggcgttaaaacgcttcttttactttttcatcccggcgatgctggtggtctactttctgcgccaggacagcaaagcgtggctgtttttcctcgtcagcacggtcgcctttggcttgctgacttatatgattgtcggcggcactcgcgccaatatcatcatcgcattcgctatcttcctgtttattggcattattcgcggctggattagcttgtggatgctggcggcggcgggcgtgctggggattgttggcatgttctggctggcactaaaacgctatggaatgaatgtgagcggcgatgaagcgttctatacgtttctctatctcactcgcgacaccttcagcccgtgggagaatctggcgttgctgttgcagaactacgacaacatcgacttccagggcctggctccaattgtccgcgatttctatgtctttatcccttcctggctgtggccgggtcgcccgagtatggtgctgaacagtgccaactactttacctgggaagtgctgaataaccactccggactggcgatcagccctacgcttataggcagtctggtggtgatgggcggcgcgttgttcatcccgctcggggcgatcgtggttggtctgatcatcaaatggttcgactggctgtatgagctgggcaaccgcgagcctaatcgctataaagctgcgatattgcacagtttctgctttggggcgatcttcaatatgatcgtgctggcgcgtgaagggctggatagctttgtcagtcgcgtggtcttttttatcgtggtcttcggcgcatgtctgatgatcgcaaaactgttgtactggctttttgaaagcgccggactcattcataaacgtacaaaaagtagcctccggacgcaggttgaaggataacaatgaataacaacaccacggcaccaacctatacgctgcgtggcttacagttgattggttggcgtgatatgcagcacgccctcgattatctgtttgctgacgggcagcttaagcagggaacgctggttgccattaatgctgaaaaaatgctgactattgaagataacgccgaggtcagggagttaattaacgctgccgaatttaaatatgcggatggcatcagcgttgtacgtagtgtacgtaaaaagtacccgcaggcgcaggtttcccgcgttgccggtgccgatctctgggaagagctgatggcgcgcgcaggcaaagaagggacgccggtatttcttgtgggcggtaaacctgaagtgctggcgcaaactgaagctaaactgcgcaaccagtggaatgtgaatatcgttggcagtcaggatggttattttaaacccgagcagcgtcaggcgctgtttgaacgcattcatgccagcggtgcgcaaatcgtcaccgttgcgatgggaagcccaaagcaggagatcatcatgcgcgactgccgtctggtacatccagatgcgctgtatatgggcgttggcgggacttacgatgttttcaccggtcacgtaaaacgcgcaccgaaaatctggcaaacgctggggctggagtggctctaccgcctgcttagccagccgagccgcattaagcgtcagcttcgtttgctgcgttatttacgctggcactacaccggcaacctatgattttcctctctttgtaaagcgacggagtggtcactccgtcgcctgtctgcttttttattacacaaagcattcaaatttttaatgctttatttgccatttctcctgaattacgaaaacatttgcaacactcgatgtacccataacgataaccggtaacaccggaaagcatgcaaacacaacacgaggatttatggcagataacaaaccagagctacagcgtgggctggaagctcgacatatcgaactcatcgccctggggggcaccattggcgtcggcctgtttatgggggccgccagtaccctgaaatgggccgggccatccgtattgttggcctatatcatcgccgggctgttcgtctttttcatcatgcgtagtatgggcgaaatgttgttcctcgaaccggttaccggtagcttcgccgtttatgcgcatcgttatatgagcccgttctttggctatctcaccgcctggtcttactggtttatgtggatggcggtggggatctctgaaatcaccgccattggcgtttatgtccagttctggttcccggagatggcgcagtggatacccgcattgatcgcagtggcgctggtggcgttggcgaatctggcggcggtgcggttgtacggcgaaatcgagttctggttcgcgatgatcaaagtcaccacgattatcgtgatgattgtcattggcctgggcgtgattttctttggctttggcaatggcgggcagagcattggttttagcaatctcacagagcatggcggtttctttgcgggtggctggaaagggttcctgaccgctctgtgtattgtggtggcgtcctaccagggcgtggagctgattggcattactgccggtgaagcgaagaatccgcaggtgacgctgcgcagtgccgtaggcaaggtgctgtggcggatcctgattttctacgtaggcgcgattttcgttatcgtcaccatcttcccgtggaatgaaataggcagcaacggcagcccgttcgtactgacttttgccaaaatcggtattaccgcagcggcgggcattatcaactttgtggtgctgacggctgcgctctctggctgtaacagcggcatgtacagttgcggacgtatgctctacgcactggcgaaaaaccgtcagttaccggcggcaatggcgaaagtttcccgtcacggcgtaccggttgcgggtgtggcagtatctattgctattctgctaattggcagttgcctgaactacatcattcccaatccgcagcgtgtgtttgtctacgtctacagtgccagcgtgcttccggggatggtgccatggtttgtgatattgataagccagctgcgttttcggcgtgcacataaagcggcgattgccagccatccgttccgcagtatcctgttcccgtgggccaattacgtaacaatggcattcctgatttgcgttttgatcggcatgtactttaatgaagatacgcgtatgagcctgtttgttggcatcatctttatgctggcggtgacggcgatttataaagtttttggccttaatcgccacgggaaagcgcataaactggaggaataagcagcaaaacgcacaaaccgtaaccaaacgcgcaatttatttaaaaagggactagacagaggggtgggaagtccgtattatccacccccgcaacggcgctaagcgcccgtagctcagctggatagagcgctgccctccggaggcagaggtctcaggttcgaatcctgtcgggcgcgccatttagtcccggcgcttgagctgcggtggtagtaataccgcgtaacaagatttgtagtggtggctatagctcagttggtagagccctggattgtgattccagttgtcgtgggttcgaatcccattagccaccccattattagaagttgtgacaatgcgaaggtggcggaattggtagacgcgctagcttcaggtgttagtgtccttacggacgtgggggttcaagtcccccccctcgcaccacgactttaaagaattgaactaaaaattcaaaaagcagtatttcggcgagtagcgcagcttggtagcgcaactggtttgggaccagtgggtcggaggttcgaatcctctctcgccgaccaattttgaaccccgcttcggcggggttttttgttttctgtgcatttcgtcaccctcccttcgcaataaacgcccgtaataactcattgccccacggtatgatttcgcccttaacgtattgaaggatgacttcaggcaaggagcgaccatgctgcaacaggttccaacgcgtgcttttcatgtgatggcgaaaccgagcggttccgattgtaatctgaactgtgactactgtttttatctcgaaaaacaatccctttaccgcgaaaagccagtcacgcatatggacgatgacacgctggaagcgtatgtccgtcactatatcgctgccagcgaaccgcaaaacgaagtggcttttacctggcagggcggcgaaccaacgctactcgggctggcgttttaccgccgtgccgtagcgctacaggcgaaatatggtgctggcaggaagataagtaacagcttccagactaacggcgtgctgctggatgacgaatggtgcgcgtttctcgcggagcatcattttcttgttggtttaagcctggatggcccgcctgagatccacaatcaatatcgcgtgactaaaggtggcagacccacgcataagctggtgatgcgtgccctgacgctcctgcaaaaacatcatgtcgactataacgtgctggtctgcgttaatcgcaccagcgcgcagcaaccgttgcaggtatatgattttttgtgcgatgcgggagtcgaattcatccagtttattccggtggtcgagcgcctggctgatgaaacaactgcccgcgatggacttaagttacatgcgcctggtgatattcagggtgagctaacggaatggagcgtgcgccccgaggagttcggtgagtttctggtggcgatattcgaccactggatcaaacgcgacgtcggcaagattttcgtgatgaatatcgaatgggcgtttgccaattttgtcggtgcgccgggtgcggtttgccatcatcagccaacctgtgggcgcagcgtgattgttgagcacaacggcgacgtttacgcctgtgatcactatgtttatccgcaatatcggctggggaatatgcaccagcaaacaattgcagaaatgatcgattccccgcaacagcaggcgtttggtgaagataaatttaagcagttaccggcgcagtgtcgcagttgtaacgtgttaaaagcgtgctggggaggctgcccgaaacaccgcttcatgctcgatgccagcggcaaaccgggactgaattatttgtgtgccgggtatcagcgttatttccgccatctaccgccatatcttaaagcaatggctgatttgctggcgcacggtcgcccggccagcgacattatgcatgcgcatttgctggtggtgagtaagtaaaaatcggcggccgcctgcggttgattgccggatgcggcgtaaacgccttatccggcctacatgatcgtgcaaattcaataaattgcagcgttctgtaggctggataagatgcgtcagcatcgcatccggcaaaggcagatctcagcgatagcgccggcttagtcagatttaatctgcgcgcgtggtggatattttttcaggatctccatatacgcgtgcatttcggtctgtagcggtacacccatcggaatatggcgcacgccgatggagtcgctttcctgcggatcggtgtagaggttaaacacgctgcttcccgccgtttgcattactgtgccggtgaatccaccctgatatccgctctgggtataagcgtaaggttgctgaatcaggacgtgatacttgaactcatccatacgcacagcagcgagtttaccgttgaggaagtagtgctcggccttacggttagactgaccatttgttcccaggaagaaggatgtctggtccacaccatcgataaaggtggttttcggcactaaattcgccactttcgctccaggatgccctgccagatccagcgcggtagggaagagatctgccagatcgacaataccgtcagatttacgcggttggatcatccctttccagtaaacgaaagtcggtacgcgaacgccgccttcccaggtgctacctttcgcaccacggaacggggtgcgtccgtgcggcggtacttcggcttccggtccgttatcggaggtaaagacgatcagcgtgttatcaagctgaccgtttttctccagtgttttatacagattagcgaacacatcgttcatctccaccatgcagtcgccatagctggtgcgtgccggagagctacccgcatatttcgcatttgggtagttatcgaagtggcagccacgagtgccgtagtagaggaagaatggtttatcgctcttcgccatcttgtcgaggaacttaacgccatagtccatccagcgttgatccagatcttccatatatttcggcgtaatgtcggcaatggcctgttgttcgccgccgcgcaccgcatgaacgtcatctttgctgaacggtaattgcttgatgtattcagaacggtccggactcagggccacttccggattgacgtgaacgtcgcgccattcggtgtacatatcagacacgctgttaaagccacggaaatcatcaaagccaacgttctgcggctggctctctttgttttcccccatatgccattttccgatggcctgagtgacgtagccctgatcgtgcagcaactgcggcagcgtggttaacccttgcagcccgcccggttgcccgtacattggcggcatcagaatgccgtggtggatggagtattgtccggtgagaatggtggcgcgggttggggaagagcttggttgagaatacgcgctagttaaaatcagcccctggctggcaacggcgtcgatatctggtgtagggttacccaccgccacgccgccaccgttaaaaccgacgtccatccagcccacatcgtccagcaagaaaacaaccacattcggtttcttaccggtttttttctcaagttctgccagcttctgctgggtttctttatcctgcgccggatgctgcattactggcatcatattgtcggcaatagtggtcgccggtttaaccagatactggtttgggtgatcgtatccggcaaagcctttgcgtgcggtggcagtactcggggtatctgctgcgctggccatgagaggaagagcggcggcgacagcaacaacaagacgtttgggactaaagctaaattccatgcaaaatgctccggtttcatgtcatcaaaatgatgacgtaattaagcattgataattgagatccctctccctgacaggatgattacataaataatagtgacaaaaataaattatttatttatccagaaaatgaattggaaaatcaggagagcgttttcaatcctacctctggcgcagttgatatgtaaggcaggtttattatatcgcgttgattattgatgctgtttttagttttaacggcaattaatatatgtgttattaattgaatgaattttatcattcataataagtatgtgtaggatcaagctcaggttaaatattcactcaggaagttattactcaggaagcaaagaggattacagaattatctcataacaagtgttaagggatgttatttcccgattctctgtggcataataaacgagtagatgctcattccatctcttatgttcgccttagtgcctcataaactccggaatgacgcagagccgtttacggtgcttatcgtccactgacagatgtcgcttatgcctcatcagacaccatggacacaacgttgagtgaagcacccacttgttgtcatacagacctgttttaacgcctgctccgtaataagagcaggcgtttttttatgtatcaggaaggccccggaggtgcttgcctccgggtgagaaggaattactgtggcgggttattctgcaacgttaacatcaaaccgtcgcgacgcatagctgcagcttcttccggcttgtgcagtctgtccagcgcgtcggcaagccatgcgtaatcgtaggcgtccggacgttgtttcagcgctgcgcggaaggcgaggcttgcttcctgccattctccgtgcttcatcagactctggcccagtgtgctccacaacagcgggcgatcgccgacgtttttgatttgctggcgcagcactttttccagctgttccggattgtttgttttcagtcgaggaatcggcagcagtaggcgatcgtcgtactggcgtttcaggccatcgatgataatttgctgggcagtatcatgatcgtcacattcaataagatgttccgccattgccacctgcaacgctacctgatgacgcgttttccggctttggtttttccaccagttacgcaaaccttcgctaccgttatcggcacgcgcctgatccatcaggccaatccatgcctgttgttccagcattgcacgatgttcttcatcaccaacatgggctttcgccatacttgggataatatccagcaggctactccatgcacctgtgcggatatacgcctgttccgccagacgtaatacttccggatggcgtggcgtaacttccagcagcttatccacgccgtggcgtgcagcatggttttcattacgggccagttgcagacgtacgcgggtgatttctaccggaatggtgtcgttgccggccagctccgctgcgcgttccagatgttggttggcgcgtgcttcatcaccacgttgttgcgcggcttcggcagccagtagatagttcaccaccggttgttccgcgtgatcggcatttttcgccatcagcttttcaacttgctgataatcgccttccgccagtttcagcagcgcctgttcggtctgcttacgtgcacggcgacgcttacgtccgacaaaccacccacgggtgtgcgcgccagtgcggaagatccgccgcagtagccactcaatggcaaacagcactaccatcgccagaatcaatatgatcgccaggcccgtgacgctggtttcgatattgtagttgtcggtctggatcagcacataaccctgatggccggcaatcatcgggccaaccacgatccccgcaatcagcaacacaaagagcaataacacttttagcatggttattctccttgcggcgcggctgccggagtatcagcttgcggtgcaggtgcaggtttagcttccgttgtccccgctgccggttgtgccagcaggttacgcacgcgagtctgcatcagtttttccagcatcgcctggctttgcagggtttccggaagatccatgctgatattttgctggcttaactggtccacctcgtcgaggaacgctttggtggtggcatcatcagtatcgtagtaagcacgtacccaggtggagacgttctccagcgcctggcgataagtctcttcctggtgacgcggtacagcttgtgctgcgaccagcaggcgagagcgaatattttcgcgcagatagatatcctgatttggcgctaacagcggtacggcggtgtcatcacgacggcgaatcgtaatgaagttgtccataaagttctgccagcttttttgcagattgatacgccattcgctgatggaactggaaagctcttcaccgtcactatccatcgggctaccatcgctgtcattatcggccagacgcaggttatctacctgattactaagctgattaagcttaaggatgatgccgtcataatccacctggcttactgcagaaaggctggcgatatcatcggtaattgcccgacgaacggtaatcagactcgggtcattcatatccgccaggctggcgtctgcacttttcagcaacgctgcagcggtcgtgacgtcctgatcgctccacagcttccgtccggcgagtttcaccagaaaatcggcctgagccagcagccaggttttagcatcgctgccggaaatggtggcgaccttttgttggacttcatccaactgttttgccagcgtttcttgctgacgattcgcctgcttaagttgtgcagcttgttgcttaataatgccttccagctcggctttttggctctcctgggctttttgcaatgccgtcagttggttagccagggcatcgctggtggcggtctgattgacggcctgttgtttaccccagccatacaaaccgatgcccgccgccagagcaatagcgatagccaccgcgctgagaatcaatgcggtattgttcttactctttttttctgttgcgacaggttgactcgtggtgtccacggcctccctggtctcttcaaccacggcggaggttttttcttgttccgtcattatggcttcctgttatgagagttattgtaatgcccgtaaaagcgcatcgttgtcagcgttatcggcgaccttaatgtcttgccagcccagttcccgggcgagtttcgccaaacgctcactgacgaccaatagtcgacagtgtagtaaccagtgctcacgataccattgtgggatcaggctccagagttgctgcaacatttcaccgctggtaacaacgaccatcgtcacctcgcgggcttgccagcgcatcgcttcttctgcaccatcgtaatggattgcgcatcgttgataacattcacaaaaagtgacctcagcaccgcgcgccgtcagggtatccccaattagctcacgaccaccattgccacgtaatatcagcgcacgtttgcccgcaatattttgtaattcaggtaattgtagcaagacttcgctgatttcccgatcctgcgggtagagaatcttctgtccacttacggtatgtagtgccagtgcggtggtgcgtccaatggcgaaataatcaggtagtcggggccatttacgatcttgctgatgcagctgactttgggcaaaagcaaccgcgtgttggctgagggcaaacaacagatcgctctcccccagcgctgccagttgatcagcaagttgcggtaattgttgacccggagaaaactcaatcagcggaaaatgccaggccacctgccccagtgtgcgcagacggctcactaactcttctccagcgggagacgggcgggtgacaaggatactcatgccggggcgtctccgttatagacttcagcgaggatctcgcgcgcgccgttattcagtagctcttctgccaggctaatccccatttgttcggcatcttgcggcgcaccgcggcgttcaccgcgaataatctggctaccgtccggcgcgccgaccagcgcacgcagccagatttcgccatcaataagctcggcgtagctaccaattggcacctgacatccgccttcgagacgggtattcatggcgcgttctgcggtaacgcgcagtgcagtttcgtggtgattcagcgcggcaagcagctcgcgagtgcgactatcatcaaggcggcattcaatacccaccgcaccttgtcctaccgccggaagagaaatctcgggtggcaacgcggcgcgaatacgactctccagacctaaacgttttagtccggctacggcaagaatgatggcatcgtattcgccgttatccagtttgctcaggcgagtgccgacgttgccgcgcagggagcggataatcagatccggacggcgttcagccagttggcactggcgacgtaaactggacgtcccgacgatactgcctgccggtaacgcatccagactgtcatagttattggacacaaaggcatcgcgaggatcttcacgctcacaaatagtgaccagtcccagaccttgcgggaattcaaccggcacatctttcatactgtgtacggcgatatcggcgcgattttcgaggagcgcgacttccagctcttttacaaataagccttttccgcctactttcgccagcggcgtatcaagaatcacatcgccgcgcgtcaccatcggtaccagttcaacgaccaggcccggatggctcgccatcaacttgtctttgacatagtgtgcctgccagagtgcaagtgggctttggcgtgtggcaattcttaaaacattgtctaacatgcttgttaccgtcattatcatccgtggtccatcctaacatccttgccagagtgatgtcagtgttgtggtgaaacgtagacgcctgcgcaaaccgtaaaatgaggtctggcagtggatcctgacaggcgtttcacgccgttgtaataaggaatttacagagaataaacggtgctacacttgtatgtagcgcatctttctttacggtcaatcagcaaggtgttaaattgatcacgttttagaccattttttcgtcgtgaaactaaaaaaaccaggcgcgaaaagtggtaacggttacctttgacatacgaaatatcccgaatgccgcgtgttaccgttgatgttggcggaatcacagtcatgacgggtagcaaatcaggcgatacgtcttgtacctctatattgagactctgaaacagagactggatgccataaatcaattgcgtgtggatcgcgcgcttgctgctatggggcctgcattccaacaggtctacagtctactgccgacattgttgcactatcaccatccgctaatgccgggttaccttgatggtaacgttcccaaaggcatttgcctttacacgcctgatgaaactcaacgccactacctgaacgagcttgaactgtatcgtggaatgagtgtacaggatccgccgaaaggtgagcttccaattactggtgtatacaccatgggcagcaccagctccgtagggcaaagttgttcctctgacctggatatctgggtctgtcatcaatcctggctcgatagcgaagagcgccaattgctacaacgtaaatgtagcctgctggaaaactgggccgccagcctgggtgtggaagtcagcttcttcctgattgatgaaaaccgcttccgtcataatgaaagcggcagcctggggggcgaagattgtggctccacccagcatatactgctgcttgacgaattttatcgtaccgccgtgcgtctcgccggtaagcgtattctgtggaatatggtgccgtgcgacgaagaagagcattacgacgactatgtgatgacgctttacgcgcagggcgtgctgacgccaaatgaatggctggatctcggtggcttaagcagcctttctgctgaagagtactttggtgccagcctttggcagctctacaagagtatcgattccccatacaaagcggtactgaaaacactgctgctggaagcctattcctgggaatacccgaacccacgtctgctggcgaaagatatcaaacagcgtttgcacgacggcgagattgtaagctttggtctcgatccatactgcatgatgctggagcgtgttactgaatacctgacggcgattgaagattttacccgtctggatttagtacgtcgctgcttctatttaaaagtgtgcgaaaagctcagccgtgaacgcgcctgcgtaggctggcgtcgcgcagtgttgagccagttagtgagcgagtggggttgggacgaagctcgtctggcaatgctcgataaccgcgctaactggaagattgatcaggtgcgtgaggcgcacaacgagttgctcgacgcgatgatgcagagctaccgtaatctgatccgctttgcgcgtcgcaataaccttagcgtctccgccagtccgcaggatatcggcgtgctgacgcgtaagctgtatgccgcgtttgaagcattaccaggtaaagtgacgctggtaaacccgcagattagtcccgatctcagcgaaccgaatctgacctttatttatgtgccgccgggccgggctaaccgtagtggttggtatctgtataaccgcgcgccaaatattgagagcatcatcagccatcagccgctggaatataaccgttacctgaataaactggtggcgtgggcatggtttaacggcctgctgaccagccgcacccgtttgtatattaaaggtaacggcattgtcgatttgcctaagttgcaggagatggtcgccgacgtgagccaccatttcccgctgcgcttacctgcaccgacaccgaaggcgctctacagcccgtgtgagatccgccatctggcgattatcgttaacctggaatatgacccgacagcggcgttccgcaatcaggtggtgcatttcgatttccgtaagctggatgtcttcagctttggcgagaatcaaaattgcctggtaggtagcgttgacctgctgtaccgcaacagctggaacgaagtgcgtacgctgcacttcaacggcgagcaaagcatgatcgaagccctgaaaactattctcggcaaaatgcatcaggacgccgcaccgccagatagcgtggaagtcttctgttatagccagcatctgcgcggcttaattcgtactcgcgtgcagcaactggtttctgagtgtattgaattgcgtctttccagcacccgccaggaaaccgggcgtttcaaggcgctgcgcgtttctggtcaaacctgggggttgttcttcgaacgcctgaatgtaagcgtacagaaactggaaaacgccatcgagttttatggcgcgattagccataacaaactgcacggcctgagtgtgcaggttgaaaccaatcacgtcaaattaccggcggtggtggacggctttgccagcgaagggatcatccagttctttttcgaagaaacgcaagacgagaatggctttaatatctacattctcgacgaaagcaaccgggttgaggtatatcaccactgcgaaggcagcaaagaggagctggtacgtgacgtcagtcgcttctacagcagtagccatgaccgttttacctacggcagtagcttcatcaacttcaacctgccgcagttctatcagattgtgaaggttgatggtcgtgaacaggtgattccgttccgcacaaaatctatcggtaacatgccgcctgccaatcaggatcacgatacgccgctattacagcaatattttagctgatgaacgtgccggaaagcgaggcttatccggcatgcaatcttagcggaaactgactgtttcacccgcctgctgcgtcgccgcctgttccagcaaatcccagaaggtttcgccgctgcgatcacaaatccactcatcgcctttcaggtcaaaatggtagccgccctgtttggttgccagccatacctggtgcagcggctcctggcggttgataatgattttgctgccattctcaaaggtaatggtcagtacgccgccgttgatttcgcagtcgatatcgctgtcgccatcccagtcgtccaggcgttcttcaatggtcagccagagttgatcagccaggcgatgaaattcactgtcgttcattgttgtatcctgtttttaagtgatggcggcagtatagcggcatggggtcagggcttcaaagtttgcacctctgcggctgcgttccggcacgatagttccgtcaccggaataatgatgtctctgtgtagcgaaagatttgtctctagtttagggcgcagttacaccacgtctttccctgtttctggtaaacattatgatcaggtttaccgagcgagcatcctcacgctgacggaactaaaaaagacaacaaacaaaccacattgcgatagtgcataaagccatcctggcgcgaggtgccgatcacgaaactaccagcaaaacataaatccccacgagtaagcgttatactcgcagcatttcctcacttttcagacttcataaagagtcgctaaacgcttgcttttacgtcttctcctgcgatgatagaaagcagaaagcgatgaactttacaggcaatccataatgaaaaacgtgtttaaggcactcactgtattacttactctcttcagcctgacgggctgcggtctgaaaggtccgctctatttcccgcctgcagataaaaacgcaccgccgccgaccaaaccggtagagacgcaaacgcaatccacggtgccggataaaaacgatcgcgccactggcgatggtccatcccaggtgaattactaaaagtcagtttctgtacccgcgtgattggagtaaatgatgcagttcagcaaaatgcatggccttggcaacgattttatggtcgtcgacgcggtaacgcagaatgtcttttttagtccggagctgattcgtcgcctggctgatcggcacctgggggtagggtttgaccaactgctggtggttgagccgccgtatgatcctgaactggattttcactatcgcattttcaatgctgatggcagtgaagtggcgcagtgcggcaacggtgcgcgctgctttgcccgttttgtgcgtctgaaaggactgaccaataagcgtgatatccgcgtcagcaccgccaacgggcggatggttctgaccgtcaccgatgatgatctggtccgcgtaaatatgggcgaacccaacttcgaaccttccgccgtgccgtttcgcgctaacaaagcggaaaagacctatattatgcgcgccgccgagcagacaatcttatgcggcgtggtgagcatgggaaatccgcattgcgtgattcaggtcgatgatgtcgataccgcggcggtagaaacgcttggtcctgttctggaaagccacgagcgttttccggagcgcgccaatatcggttttatgcaagtggttaagcgcgagcatattcgtttacgcgtttatgagcgtggggcaggagaaacccaggcctgcggcagcggcgcgtgtgcggcggttgcagtagggattcagcaaggtttgctggccgaagaagtacgcgtggaactccccggcggtcgtcttgatatcgcctggaaaggtccgggtcacccgttatatatgactggcccggcggtacatgtctacgacggatttattcatctatgaagcaaccaggggaagaactgcaggaaacactcacggagcttgatgaccgggcggttgtcgattatctgattaaaaatcctgagttttttatccgtaatgcgcgcgcagtagaagcgatacgtgtgccgcatccggtacgcggcaccgttagcttggtcgagtggcacatggcccgcgcacgtaatcatattcatgttctggaagagaacatggcgctgttgatggaacaggctatcgccaacgaaggcctgttttatcgcctactctacctgcagcgcagtctcaccgccgccagcagtctcgacgatatgctgatgcgctttcaccgctgggcgcgcgatctcggcctggcaggtgcgagtctgcgcctgtttccggatcgctggcgcttaggtgcgccgagcaaccacactcatctggcattaagccgtcagtctttcgaaccgctgcgtattcagcgtttggggcaggaacagcactatcttgggccgcttaacggaccagagctgctggtggtgctaccggaagcgaaagcggtgggaagcgtggcgatgagcatgctgggaagcgatgctgatttgggtgtcgtgctgtttaccagtcgcgatgccagtcactatcaacaagggcaaggaacgcagttacttcatgaaattgcgctgatgttgccggagcttctggagcgttggattgaacgcgtatgaccgatttacacaccgatgtagaacgctacctacgttatctgagcgtggagcgccagcttagcccgataaccctgcttaactaccagcgtcagcttgaggcgatcatcaattttgccagcgaaaacggcctgcaaagctggcagcaatgtgatgtgacgatggtgcgcaattttgctgtacgcagtcgccgtaaagggctgggagcagcaagtctggcgttacggctttctgcgctacgtagcttttttgactggctggtcagccagaacgaactcaaagctaacccggcgaaaggtgttagcgcaccgaaagcgccgcgtcatctgccgaaaaacatcgacgtcgacgatatgaatcggctgctggatattgatatcaatgatcccctcgctgtacgcgaccgtgcaatgctggaagtgatgtacggcgcgggtctgcgtctttctgagctggtggggctggatattaaacacctcgacctggagtctggtgaagtgtgggttatggggaaaggcagcaaagagcgccgcctgccgattggtcgcaacgctgtggcgtggattgagcactggcttgatttgcgcgacctgtttggtagcgaagacgacgcgctttttctgagcaaactgggcaagcgtatctccgcgcgtaatgtgcagaaacgctttgccgaatggggcataaaacaagggctgaataatcacgttcatccgcataaattacgtcacagcttcgccacgcatatgctggagagcagcggcgatcttcgtggtgtgcaggagctgctgggtcatgccaacctctccaccacgcaaatctatactcatcttgattttcaacaccttgccagcgtgtacgatgcggcgcatccacgcgccaaacgggggaaataatgcgtttttaccggcctttggggcgcatcagcgcgctcacctttgacctggatgataccctttacgataaccgtccggtgattttgcgcaccgagcgagaggcgcttacctttgtgcaaaattatcatccggcgctgcgcagcttccagaatgaagatctgcaacgcctgcgccaggcggtacgggaagcggaacccgagatttatcacgacgtgacgcgctggcgttttcgtagcattgaacaagcgatgctcgacgccgggctgagtgccgaagaagccagtgcaggcgcacacgcagcaatgatcaactttgccaaatggcgcagccgaatcgacgtcccgcagcaaactcacgacaccttaaaacagctggcgaagaaatggccgctggtggcgatcaccaacggtaacgcccagccggagctgtttggtttgggggattattttgagtttgtgctgcgcgctggcccgcacgggcgcagtaaaccgttcagcgatatgtactttttggctgcggaaaaactcaacgtgccgatcggcgagatcttacatgttggggacgatctcaccactgacgtgggtggggcaattcgcagcggaatgcaggcttgttggatcagaccggaaaatggcgatctgatgcaaacctgggacagccgtttactgccgcatctggaaatttcccggttggcatctctgaccagcctgatataatcagcaaatctgtatatatacccagctttttggcggagggcgttgcgcttctccgcccaacctatttttacgcggcggtgccaatggacgtttcttacctgctcgacagccttaatgacaaacagcgcgaagcggtggccgcgccacgcagcaaccttctggtgctggcgggcgcgggcagtggtaagacgcgcgtactggtgcatcgtatcgcctggttgatgagcgtggaaaactgcagcccatacagcattatggcggtgacgtttaccaacaaagcggcggcggagatgcgtcatcgtatcgggcaactgatgggcacgagccagggcggtatgtgggtcggcaccttccacgggctggcgcaccgtttgctgcgtgcgcaccatatggacgccaatctgccgcaggatttccagatcctcgacagtgaagaccagctacgcctgcttaagcgtctgatcaaagccatgaacctcgacgagaagcagtggccgccgcggcaggcaatgtggtacatcaacagccagaaagatgaaggcctgcgtccgcatcatattcaaagctacggtaatccggtggagcagacctggcagaaggtgtatcaggcgtatcaggaagcgtgtgaccgcgcgggcctggtggacttcgccgagctgctgctgcgcgctcacgagttgtggcttaacaagccgcatatcctgcaacactaccgcgaacgttttaccaatatcctggtggacgaattccaggataccaacaacattcagtacgcgtggatccgcctgctggcgggcgacaccggcaaagtgatgatcgtcggtgatgacgaccagagtatctacggctggcgcggggcgcaggtggagaatattcagcgtttccttaatgatttccccggtgccgaaactattcgtctggagcaaaactaccgctctaccagcaatattctgagcgccgctaacgccctgattgaaaacaataacgggcgtctgggtaaaaaactgtggaccgatggcgcggacggtgagcctatttccctctattgcgcttttaacgaactcgatgaagcgcgttttgtggttaaccgcatcaaaacctggcaggacaacggcggagcgcttgccgagtgcgccattctctaccgcagcaacgcccagagccgggtgctcgaagaggcgttattgcaggccagtatgccgtaccgtatttacggcgggatgcgcttcttcgaacgccaggaaatcaaagatgcgctcagctatctgcgcctgattgccaaccgcaacgacgacgcggcctttgagcgtgtggtgaatacgccaacgcggggtattggtgaccggacgctggacgtggtacgtcagacaagccgcgatcgccagttaacactctggcaggcatgtcgtgagctgttgcaggaaaaagccctcgccgggcgagctgccagcgccttgcagcgatttatggaattaatcgacgccttagcgcaggaaactgccgatatgccgctgcatgtacagactgaccgggtaattaaagactccggcctgcgtaccatgtatgagcaggagaagggcgaaaaaggtcagacgcgtatcgaaaacttagaggaactggtgacggcaacgcgccagttcagctacaacgaagaagacgaagatttaatgccgctgcaggcgttcctctcccatgcggcactggaagcaggtgaagggcaggcggatacctggcaggatgcggtgcagttgatgacgctacacagcgcgaaaggcctggagttcccgcaggtgtttatcgttggtatggaagagggcatgttcccaagccagatgagcctggatgaaggcgggcgtctggaagaagaacgccgtctggcctacgttggcgtaacccgcgcgatgcagaaactgacgctgacctacgcggaaacccgccgtctgtatggtaaagaggtttaccatcgcccgagccgctttatcggcgagctgccggaagagtgtgtggaagaggtgcgcctgcgcgccacggtaagccgcccggtcagccatcagcggatgggtacgccgatggtcgagaacgacagcggctacaagctcggccagcgcgtacgccacgctaagtttggtgaaggcaccattgtcaatatggaaggcagcggtgagcatagccgtttgcaggtggcatttcagggccagggtattaaatggctggtggcggcatacgcccggctggagagcgtgtaacgttgccggatgcggtgctgcgcaccttatttggcctaaaaaatcattcagattcaataaattgcaacgtcatgtaggccggatagggcgtttacgccgcatccggcatctgcgccatcttcagtatctgacacaaaactatcgttttaacctttccgctcgacggaaatcatggtgacaaaaggatagcgttgccacgggattgccccgcctttcatatacatatgactaatcgtgccatcaagataaagcagctgctcaacgttcagtttcgctttggcataacaggcaaaatcataaaaatttgttgcctgctggctcaacaaaaacacggcgttcccatgtttattaatcccaacaccgttacgaattttgctactggcgacgttgggatgaatacgcggattaattacaccgttttccatcaacattggcccactctgcaccgcaaactgaatctctttactggttttgaaggcatccagacgaacgatgccgactttatctcccgcgacataaaacacgccgccaggacggataaagaaattcccttcaccactagcgagatttaacgccaccttctgctgaccgttttcgatgtacaaaccgagcggcgcatagctttcatcatagatgccgccgttcatcgccatctgcacctgaccctgactattaatatccgccagcagagcatgtaacgttccccacgcttcgccattggctttttgccagtacattttcacccgctctgtttgaggattaacggtatacgcctgtacggtcagcgtcggatcactgagtgcgcaatcatcagcggcaacagcaaacaagggaagtaaggtgagggcgagaaaaatccgtttgagattcaaggtgatcattcctttaccaatgagtagctgatgcgccattataggtcctggatgtgggatttttttatcctgttagcgaccttgacgagtaccaaaaagcgcgaagttcaactattgttctgtggtgttctgttgcgtgttgacggcaaaattttgctggcgtaacatgcgcgcacgatcactctaagaggacattcgccttggacacacccagtagatactggctcactatcctgtcatccaggatcaactcctaaggctatccctttttgctgatagccttagcggttgtcagcgacctcaatttttcccgtcgcgctgagtcaggctgtttaatggtctgaaacccaatttgtttctgtgtgcccaccgaactgtccgatattttaagcattgggagtcccggtcatgctgagcgcatttcaactggaaaataaccgactgacccggctggaagtcgaagagagtcaaccccttgtaaatgcagtatggattgatcttgtcgaaccggacgacgacgagcgactgcgcgtacaatctgaacttggccagagcctggcaacccgcccggaactggaagacatcgaagcaagcgcacgtttctttgaagacgacgacggcctgcatattcactccttcttcttctttgaagatgcggaagatcacgccggtaactccactgtggcatttaccatccgtgatggtcgtctgtttactctgcgtgagcgtgaactgcccgcttttcgtctgtatcgtatgcgtgcccgtagccagagcatggtagacggtaacgcctacgagttgctgctggatctgttcgaaaccaaaatcgaacagttggcagatgaaattgaaaatatctatagcgacctggagcagttgagccgggtgattatggaagggcatcagggcgatgagtacgacgaggcgctctccactctggcggaactggaagatatcggctggaaagttcgcctgtgtctgatggatacccagcgcgcgctcaacttcctggtgcgtaaagcgcgtttaccgggtgggcaactggagcaggcgcgtgaaatcctgcgagatatcgaatccctgctgccgcataacgaatccctgttccagaaggtgaacttcctgatgcaggcggcaatgggttttatcaacatcgagcagaaccgcatcatcaaaatcttcagcgtggtatccgtggtattcctgccgccgacgctcgttgcttccagctatggcatgaactttgagtttatgccagaactgaagtggagcttcggctaccctggcgcgattatctttatgatcctcgcgggcctggcaccgtatctgtactttaagcggaagaactggttgtaaaaaacgagagcggtggcttagtctggctaagccacctgttattcaaaggctccaggtatttaacccttttacctctttctcatagaaccatttgttcgtgttaacagcaacataggctgctacggcaattcccagaatgttaacgccaattagtgcaccaacaaatagagatagaataccaagtaatagaactataattgcttttttccataaccccaggacaaataaatatatccaggaacagaagaaagcaatgaaattcatttgaatagttaagcgttgtcttacttttaatgctttaaatgctgctttatattctggtgttgccccccagaatccaggaaaaccatgttgatcataaaaattaaatcggtatttccatttttcacttaaactaccatcgttcatatattccttactcataaatactccataattattgtttactactatcagtaggtgcaagcattagcatactgaaagtggaaaaataacaaatcaaaaaaatcatgctaccattgccactacaggcaaaatcttcggctatcattgtgatgatagagatgatatatactgctaatgtaccaaaaacataagtttttatatagatgaaaccactatcacggagtcgctggcaattcatgttgatgacgagataatggagtacgatggtagagactataacaagaaagcctgcttctccatcgttaaaaaagataataagaaaggcaaaaatgaaatttattaaaataaaactaaatatataacgacgtctggaaatcttaccgttagatgttgggataaatatacgtaacataaattttacatccttgtatgagtctccggtcagcatggcaatatgcccactctcatgcaagagtcggcatattttttcagaatatatttattttttatttggacgttctacgctgcgtataaatcgcatccatcacaaaaattgccagcgccacccaaataaaggcgaaagtcaccatcttatcggcacccggtttttcaccataaaacgtcacagccagcaggaacatcagcgtcgggccaatgtactggaaaaagcctaacgtactgagacgcaagcgcgtggcagcggcggtaaaacacaacagcggtacggtagtgacaataccggcggcgatcagcagtaaattcaggctcatcgggttttgccccatatggctggtactgctgtcggcaatagcaaacaggtaaattgccgccacgggcagcagccacatggtttcgattaacatgccggtttgcgcttcaacggcaatcttcttgcgtaccagaccgtagaaggcaaaactaaatgccagtcccagcgcgataataggtaggctaccaaaagtccacagctggactaacacgccacatatcgccagaatcaccgccagccattgcatccggcggaatcgctcgccgaggaaaatcatccccagcacaatgttcaccagcgggttaataaagtaaccaaggctcgcttccagcatatggtgattgttcaccgcccagataaacagtagccagttgccaccaatcagcacggcagagactgccagcataaaaattttctgtggcgtctgaatcagcgtttttaaataggaccactggcggcaaatgctcatcagcaccaccataaagaaaaagctccagatcacgcgatgcgtcaggatttcatcggcgggcacgtagtaaatcaacttgaagtacgctggcgctataccccaaataaaataagcggcaagagcgagtaatacgccctgccgcgtttgttttgcatccatcgggaatactcatttttaattggtaacagcagtttacctgcttttatgtcttcaacctaccatataggtggcggtggcactggcaatataaagctgttcttcattgtgtaattcaacgcgggcgacggcgactttattgcctgcacgcaacaggctactagtagcagtaaaacgctcgcccctgcctgggcgcagataatcaacgcgaagatcaatggtccccatccggcttagccgctggcgtagttcatcttcactgatggtttcgtggcgggttaaggtacttcccacgcacaccagaccggcggcgacatccagcgcgctcgcaatgaccccgccgtgcaaaatgctttgcgcccagttgcccaccatcattggctgatttttaaaggccagctgtgcgaactctttttcgtaacgctccagttccatccccaatgcgcggttaaatggcatgtgataaacaaacatctcacccactaatttcagggcttgttcagcggtcagtacggcagacatatcatccttacacttcattggttaatgaaatgttgattttatgcttctttgttgttggtttctactttaggaagggataactaacggctatggagttaagtatgtaaaatagcccgcagaaaaatattcaccttatcaataattcgttacggagaacacgaccgatgcggactctgcagggctggttgttgccggtgtttatgttgcctatggcagtatatgcacaagaggcaacggtgaaagaggtgcatgacgcgccagcggtgcgtggcagtattatcgccaatatgctgcaggagcatgacaatccgttcacgctctatccttatgacaccaactacctcatttacacccaaaccagcgatctgaataaagaagcgattgccagttacgactgggcggaaaatgcgcgtaaggatgaagtaaagtttcagttgagcctggcatttccgctgtggcgtgggattttaggcccgaacagcgtgttgggtgcgtcttatacgcaaaaatcctggtggcaactgtccaatagcgaagagtctagtccgtttcgtgaaaccaactacgaaccgcaattgttcctcggttttgccaccgattaccgttttgcaggttggacgctgcgcgatgtggagatggggtataaccacgactctaacgggcgttccgacccgacctcccgcagctggaaccgcctttatactcgcctgatggcagaaaacggtaactggctggtagaagtgaagccgtggtatgtggtgggtaatactgacgataacccggatatcaccaaatatatgggttactaccagcttaaaatcggctatcacctcggtgatgcggtgctcagtgcgaaaggacagtacaactggaacaccggctacggcggcgcggagttaggcttaagttacccgatcaccaaacatgtgcgcctttatactcaggtttacagcggctatggcgaaagcctcatcgactataacttcaaccagacccgtgtcggtgtgggggttatgctaaacgatttgttttgatgaacggttgagtggttggcaaatctggaatccagcatccaggattaccctctcagagactaaaagcattgcagtttctcgcgcaggcgctgaaaatagcgcctgtttttatttcaggcaatcggggtgaatgtggcgcaggcggaagtgttgaatctggagtccggagctaaacaggttttacaagaaacctttggctaccaacagtttcgccccggccaggaagaaattatcgacactgtgctttccggccgcgattgcctcgtcgtcatgcccactggtggcggaaaatccctttgctatcaaatccctgccttattgctaaacggccttaccgtggttgttagtccgctgattagcttgatgaaagatcaggtggatcaactgcaagccaacggcgtggcggcggcgtgccttaacagcacgcaaacccgcgaacagcaacttgaagtgatgacaggctgccgcaccgggcaaattcgtctgctttatatcgccccggaacgcctgatgctggataactttcttgagcatctggcgcactggaatccggtgttattagccgttgatgaagcgcactgtatctcccaatggggccacgatttccgcccggaatatgccgcgctcggtcagttgcgccagcggttcccgacgctgccgtttatggcgctgaccgccacagccgacgacaccacgcgccaggatatcgtgcgcctgctggggctgaacgatccgctgattcaaatcagcagttttgaccgtccgaatattcgctacatgctgatggagaagttcaaaccgctcgatcagttgatgcgctacgtgcaggaacagcgcggtaagagtggcattatctactgcaacagccgcgcgaaagtagaagacaccgctgcgcgcctgcaaagcaagggaattagcgcggcggcctatcatgccgggctggaaaataatgttcgcgccgatgtgcaggaaaaattccagcgcgatgacctgcaaattgtggtggcgacggtggcgttcggcatgggcatcaataaaccaaacgttcgcttcgtggtccactttgatattccgcgcaatatcgaatcctattatcaggaaaccggacgcgccgggcgtgatggcctgcccgcggaagcgatgctgttttacgatccggctgatatggcgtggctgcgccgttgtctggaagagaagccgcaggggcagttgcaggatatcgagcgccacaaactcaatgcgatgggcgcgtttgccgaagcgcaaacttgccgtcgtctggtattgctgaactattttggcgaagggcgtcaggagccgtgcgggaactgcgatatctgcctcgatccgccgaaacagtacgacggtagtaccgatgctcagattgccctttccaccattggtcgtgtgaatcagcggtttgggatgggttatgtggtggaagtgattcgtggtgctaataaccagcgtatccgcgactatggtcatgacaaactgaaagtctatggcatgggccgtgataaaagccatgaacattgggtgagcgtgatccgccagctgattcacctcggcctggtgacgcaaaatattgcccagcattctgccctacaactgacagaggccgcgcgcccggtgctgcgcggcgaatcctctttgcaacttgccgtgccgcgtatcgtggcgctcaaaccgaaagcgatgcagaaaagcttcggcggcaactatgatcgcaaactgttcgccaaattacgcaaactgcgtaaaagcatagccgatgaaagtaatgtcccgccgtacgtggtgtttaacgacgcaaccttgattgagatggctgaacagatgccgatcaccgccagcgaaatgctcagcgttaacggcgttgggatgcgcaagctggaacgctttggcaaaccgtttatggcgctgattcgtgcgcatgttgatggcgatgacgaagagtaatcagcagcataaaaaagtgccagtatgaagactccgtaaacgtttcccccgcgagtcaaatgtatgttgatgttatttctcaccgtcgccatggtgcacattgtggcgcttatgagccccggtcccgatttcttttttgtctctcagaccgctgtcagtcgttcccgtaaagaagcgatgatgggcgtgctgggcattacctgcggcgtaatggtttgggctgggattgcgctgcttggcctgcatttgattatcgaaaaaatggcctggctgcatacgctgattatggtgggcggtggcctgtatctctgctggatgggttaccagatgctacgtggtgcactgaaaaaagaggcggtttctgcacctgcgccacaggtcgagctggcgaaaagtgggcgcagtttcctgaaaggtttactgaccaatctcgctaatccgaaagcgattatctactttggcagcgtgttcagtttgtttgtcggtgataacgttggcactaccgcgcgctggggcatttttgcgctgatcattgtcgaaacgctggcgtggtttaccgtcgttgccagcctgtttgccctgccgcaaatgcgccgtggttatcaacgtctggcgaagtggattgatggttttgccggggcgttatttgccggatttggcattcatttgattattagccggtgatgccagacgcgtcttcagagtaagtcggataaggcgtttacgccgcatccgacattatttttcacgcatgcctcgcgcttgctaacagcgctcccaccagcataaacaagctgccgaaaatcttattcagcgccttcatctgctttggtcctttaatccatagagcaatccgttgagcaagggtggcgtaaccgatcatcacaataatatcgaccacaatagtggtgacgccgagcacgatatactgcatcagttgcggctgttgcggcatgatgaattgcggaaatagcgccgccagaaacacaatacttttgggattggtgagattcacaaaaactgcgcgctggaacaaatgtcgacggctttgagtagaggccaggcttttaaggtcaattgcaccagcggcgcgccactgctggattcccagccaaatcaagtaagccgcgcctgcccacttcaacacttcaaacgcaatcacactgcgggaaaatagcgtccccaaccccacgccaaccagcacaatatgaatcgccagtccggtctgaagcccagcaatagacgccaccgcgccgcgataaccgtggttgaggctggtggtcatagtgttgattgcaccagagcctgggctcaggcttaaaatgatgcttgtcagcaggtaggcaaaccaccattctaaggtcatgatgaactcccggtgtgtctatttttgtgccacaatacgctactgtcgcagcgttgtgtcaggcacgctaaaaaaaacgattttacgtggtttaagaggcagattacccgatgtttcagcagcaaaaagactgggaaacaagagaaaacgcgtttgctgcttttaccatgggaccgctgactgatttctggcgtcagcgtgatgaagcagagtttactggtgtggatgacattccggtgcgctttgtccgttttcgcgcacagcaccatgaccgggtggtagtcatctgcccggggcgtattgagagctacgtaaaatatgcggaactggcctatgacctgttccatttggggtttgatgtcttaatcatcgaccatcgcgggcagggacgttccggtcgcctgttagccgatccgcatctcgggcatgttaatcgctttaatgattatgttgatgatctggcggcattctggcagcaggaggttcagcccggtccgtggcgtaaacgctatatactggcacatagcatgggcggtgcgatctccacattatttctgcaacgccatccaggtgtatgtgacgccattgcgctaactgcgccaatgtttgggatcgtgattcgtatgccgagttttatggcacggcagatcctcaactgggccgaagcgcatccacgtttccgtgatggctatgcaataggcaccgggcgctggcgcgcgttgccgtttgctatcaacgtactgacccacagcagacagcgatatcgacgtaacttacgcttctatgctgatgacccaacgattcgcgtcggtgggccgacctaccattgggtacgcgaaagtattctggctggcgaacaggtgttagccggtgcgggtgatgacgccacgccaacgcttctcttgcaggctgaagaggaacgcgtggtggataaccgcatgcatgaccgtttttgtgaactccgcaccgccgcgggccatcctgtcgaaggaggacggccgttggtaattaaaggtgcttaccatgagatcctttttgaaaaggacgcaatgcgcagtgtcgcgctccacgccatcgttgattttttcaacaggcataacagtcccagcggaaaccgctctacagaggtttaaatttcttatgtaccaggttgttgcgtctgatttagatggcacgttactttctcccgaccatacgttatccccttacgccaaagaaactctgaagctgctcaccgcgcgcggcatcaactttgtgtttgcgaccggtcgtcaccacgttgatgtggggcaaattcgcgataatctggagattaagtcttacatgattacctccaatggtgcgcgcgttcacgatctggatggtaatctgatttttgctcataacctggatcgcgacattgccagcgatctgtttggcgtagtcaacgacaatccggacatcattactaacgtttatcgcgacgacgaatggtttatgaatcgccatcgcccggaagagatgcgcttttttaaagaagcggtgttccaatatgcgctgtatgagcctggattactggagccggaaggcgtcagcaaagtgttcttcacctgcgattcccatgaacaactgctgccgctggagcaggcgattaacgctcgttggggcgatcgcgtcaacgtcagtttctctaccttaacctgtctggaagtgatggcgggcggcgttagtaaaggccatgcgctggaagcggtggcgaagaaactgggctacagcctgaaggattgtattgcgtttggtgacgggatgaacgacgccgaaatgctgagcatggcggggaaaggctgcattatgggcagtgcgcaccagcgtctgaaagaccttcatcccgagctggaagtgattggtactaatgccgacgacgcggtgccgcattatctgcgtaaactctatttaagctaatcgttctttatttggtcagttgtcaacctgatacttcgctacaatggatacccgttaatcaaagagttttccattgtggcgctacttatcatcaccacgattctgtgggccttctcctttagcttttatggcgagtaccttgcggggcacgtcgatagctattttgcggtgctggtgcgcgttggcctggcggcactcgtttttctgccgtttctgcgtacccgtggcaatagcctgaaaacggtcggcctgtatatgctggtgggcgcgatgcagcttggcgtgatgtatatgctgagtttccgcgcttatctctacctgacggtttccgagctgctgctgttcaccgtgctgacgccgctctacatcacgctgatttatgacatcatgagtaagcgccgtctgcgctggggctatgcctttagcgccttgctggcggtgattggtgccgggattattcgctatgatcaggtcaccgaccatttctggactggcttgctgctggtgcaactctccaatatcacttttgccattggcatggtgggttacaaacgcctgatggaaactcgcccgatgccacagcataacgcctttgcgtggttctatcttggcgcgtttctggtggcagtgattgcatggttcttgctgggaaatgcgcagaaaatgccgcaaaccacgctgcaatggggcattctggtgtttcttggcgtggtggcttccgggattggctactttatgtggaactacggcgcgacgcaggtggacgccggaacgctgggcattatgaataatatgcacgttccggcagggctgctggtaaacctggctatctggcaccaacagccgcactggccaacgtttattacaggcgcgctggtgatcctggccagtctgtgggtgcatcgtaagtgggtcgctccgcgctctagtcaaacggcagatgatcgcaggcgtgattgcgcgctgagcgaataattacaggcgcgctggacttcctggcctcactgtgggtgcatcgtaagtgggtcgctccgcgctcttcacaaacggcagatgatcgcaggcgtgattgcgcgcactgcgaataaacgcttccgtaactggctgacgctgctcgccatcgcgcacggcggcgtacagtcggctccacaagccttcgcccagggttttggtcaccaccagaccctggcgctcaaaactctctactacccaatgcggtagcgcggcaatacccatccgcgcggcaaccatctgaatcaacaataaggtgttatcgacgcttttcagactcgggctgacgcctgccggctgaagaaaatgccgccagacatccagtcgactacgctgcaccggataaattaatagcgtctcgctggcgagatcttccggtgtaattcgcgttttcgccgccagtggatggtcaggtgctaacaccagacgcacttcatagtcgaacatcgggctataatgcaggccactgcgcggcagaatatcggacgtcattaccagatccagctctccctgttgcaaggcgggctgcgggtcaaatgtcacgccgcttttaaaatccatctctacctgcggccagttcttatggaaattttctaacgcgggtgtcagccactgaatacagctatggcactcaatggcaatgcgcagacgcgtctgctgcggttcattgcaggcttgcagggcctggctaatttgcggcagtacctggtttgccagttgcaacaggatttctccctgcggtgtaaagcgtagcggctggctcttacgcacaaatagccggaagccaaggcgttgttccagatcgctaaactggtgagacagggcggattgcgtctgatgcaacgtcgccgcagcggctgcgaggctgccgcagttccgcaacgcttgtagcgttttcaggtgttttacttcgatcatgaaagtccttcacttcggcatgaataatttgcgcttgaggaatatacagtaaccgccaattatggatgtgtaaacatctggacggctaaaatccttcgtcttttaaatttatggtgcgttggctgcgtttctccaccccggtcacttacttcagtaagctcccggggatgaataaacttgccgccttccctaaattcaaaatccataggatttacatataattagaggaagaaaaaatgacaatattgaatcacaccctcggtttccctcgcgttggcctgcgtcgcgagctgaaaaaagcgcaagaaagttattgggcggggaactccacgcgtgaagaactgctggcggtagggcgtgaattgcgtgctcgtcactgggatcaacaaaagcaagcgggtatcgacctgctgccggtgggcgattttgcctggtacgatcatgtactgaccaccagtctgctgctgggtaacgttccggcgcgtcatcagaacaaagatggtagcgtagatatcgacaccctgttccgtattggtcgtggacgtgcgccgactggcgaacctgcggcggcagcggaaatgaccaaatggtttaacaccaactatcactacatggtgccggagttcgttaaaggccaacagttcaaactgacctggacgcagctgctggacgaagtggacgaggcgctggcgctgggccacaaggtgaaacctgtgctgctggggccggttacctggctgtggctggggaaagtgaaaggtgaacaatttgaccgcctgagcctgctgaacgacattctgccggtttatcagcaagtgctggcagaactggcgaaacgcggcatcgagtgggtacagattgatgaacccgcgctggtactggaactaccacaggcgtggctggacgcatacaaacccgcttacgacgcgctccagggacaggtgaaactgctgctgaccacctattttgaaggcgtaacgccaaatctcgacacgattactgcgctgcctgttcagggtctgcatgttgacctcgtacatggtaaagatgacgttgctgaactgcacaagcgcctgccttctgactggttgctgtctgcgggtctgatcaatggtcgtaacgtctggcgcgccgatcttaccgagaaatatgcgcaaattaaggacattgtcggcaaacgtgatttgtgggtggcatcttcctgcagcttgctgcacagccccatcgacctgagcgtggaaacgcgtcttgatgcagaagtgaaaagctggtttgccttcgccctacaaaaatgccatgaactggcactgctgcgcgatgcgctgaacagtggtgacacggcagctctggcagagtggagcgccccgattcaggcacgtcgtcactctacccgcgtacataatccggcggtagaaaagcgtctggcggcgatcaccgcccaggacagccagcgtgcgaatgtctatgaagtgcgtgctgaagcccagcgtgcgcgttttaaactgccagcgtggccgaccaccacgattggttccttcccgcaaaccacggaaattcgtaccctgcgtctggatttcaaaaagggcaatctcgacgccaacaactaccgcacgggcattgcggaacatatcaagcaggccattgttgagcaggaacgtttgggactggatgtgctggtacatggcgaggccgagcgtaatgacatggtggaatactttggcgagcacctcgacggatttgtctttacgcaaaacggttgggtacagagctacggttcccgctgcgtgaagccaccgattgtcattggtgacattagccgcccggcaccgattaccgtggagtgggcgaagtatgcgcaaagcctgaccgacaaaccggtgaaagggatgctgacggggccggtgaccatactctgctggagcttcccgcgtgaagatgtcagccgtgaaaccatcgccaaacagattgcgctggcgctgcgtgatgaagtggccgatctggaagccgctggaattggcatcatccagattgacgaaccggcgctgcgcgaaggtttaccgctgcgtcgtagcgactgggatgcgtatctccagtggggcgtagaggccttccgtatcaacgccgccgtggcgaaagatgacacacaaatccacactcacatgtgttattgcgagttcaacgacatcatggatagcattgcggcgctggacgcagacgtcatcaccatcgaaaccagccgttccgacatggagttgctggagagctttgaagagtttgattatccaaatgaaatcggtcctggcgtctatgacattcacagcccaaacgtaccgagcgtggaatggattgaagccttgctgaagaaagcggcaaaacgcattccggcagagcgcctgtgggtcaacccggactgtggcctgaaaacgcgcggctggccagaaacccgcgcggcactggcgaacatggtgcaggcggcgcagaacttgcgtcgggggtaaaatccaaaccgggtggtaataccacccggtcttttctcattacaggctcttcttcccaccatactgcttaaaccattccagcatacgctgccagccatcttctgcagatgcggcatgatagctcgggcgataatcagcgttgaatgcatgcccggcgtccgggtacacgataatctctgctttcgcattagcagcccgcagcgcctggcgcatggtttcaacgctctcctgcggaatgctgttatcctgaccaccatataagccgagaatcggcgcgttaagatcggttgcgatatcaacaggttgtttcggactattcaggctcttgtcgcccgtcagtttgccgtaccacgccactgcggcttttagctgtggattatgcgcggcatacagccaggtgatacgtccaccccagcagaatccggtgatcattaaacgatgaacatcgccgccgttgcgggaagcccaactggcgacatgatcgagatcggccagcacctggctgtcaggcacttttgctaccagaccgctaagcaacgtggggatatcggcaaaatcattcggatcgccttcgcggaagtaaagttcaggtgcgatagccagatacccctccagcgccagacggcgacaaatgtcgcggatatgttcatgcacgccaaaaatttcctgcactacaatgaccactggcagtgggccatcgctttgctttggtctggcatggtaagcaggcatgttatccccttgactagggatagaggtgaagcccgccacaatcgcgtcgtccggggtctgaacgatggtgctagcgagagggcttgcagcaggtgcaaatccagattgttgtgttgttgccatggtattctccgtacccttataaaaatgttgcgcaatgttaactatagtcagcatgcaacaaatcacattgcctgaatcggctcatcttttatgcagtcctgcagaatgaagggtgatttatgtgatttgcatcacttttggtgggtaaatttatgcaacgcatttgcgtcatggtgatgagtatcacgaaaaaatgttaaacccttcggtaaagtgtctttttgcttcttctgactaaaccgattcacagaggagttgtatatgtccaagtctgatgtttttcatctcggcctcactaaaaacgatttacaaggggctacgcttgccatcgtccctggcgacccggatcgtgtggaaaagatcgccgcgctgatggataagccggttaagctggcatctcaccgcgaattcactacctggcgtgcagagctggatggtaaacctgttatcgtctgctctaccggtatcggcggcccgtctacctctattgctgttgaagagctggcacagctgggcattcgcaccttcctgcgtatcggtacaacgggcgctattcagccgcatattaatgtgggtgatgtcctggttaccacggcgtctgtccgtctggatggcgcgagcctgcacttcgcaccgctggaattcccggctgtcgctgatttcgaatgtacgactgcgctggttgaagctgcgaaatccattggcgcgacaactcacgttggcgtgacagcttcttctgataccttctacccaggtcaggaacgttacgatacttactctggtcgcgtagttcgtcactttaaaggttctatggaagagtggcaggcgatgggcgtaatgaactatgaaatggaatctgcaaccctgctgaccatgtgtgcaagtcagggcctgcgtgccggtatggtagcgggtgttatcgttaaccgcacccagcaagagatcccgaatgctgagacgatgaaacaaaccgaaagccatgcggtgaaaatcgtggtggaagcggcgcgtcgtctgctgtaattctcttctcctgtctgaaggccgacgcgttcggccttttgtatttttgcgtagcgcctcgcaggaaatgcctttccaactggacgtttgtacagcacaattctattttgtgcgggtaagttgttgcgtcaggaggcgttgtggatttcagtatcatggtttacgcagttattgcgttggtgggtgtggcaattggctggctgtttgccagttatcaacatgcgcagcaaaaagccgagcaattagctgaacgtgaagagatggtcgcggagttaagcgcggcaaaacaacaaattacccaaagcgagcactggcgtgcagagtgcgagttactcaataacgaagtgcgcagcctgcaaagtattaacacctctctggaggccgatctgcgtgaagtaaccacgcggatggaagccgcacagcaacatgctgacgataaaattcgccagatgattaacagcgagcagcgcctcagtgagcagtttgaaaacctcgccaaccgtatttttgagcacagcaatcgccgggttgatgagcaaaaccgtcagagtctgaacagcctgttgagcccgctacgtgaacaactggacggtttccgccgtcaggttcaggacagcttcggtaaagaagcacaagaacgccataccctgacccacgaaattcgcaatctccagcaactcaacgcgcaaatggcccaggaagcgatcaacctgacgcgcgcgctgaaaggcgacaataaaacccagggcaactggggcgaggtagtattgacgcgggtgttggaggcttccggtctgcgtgaagggtatgaatatgaaacccaggtcagcatcgaaaatgacgcccgcagccggatgcagccggatgtcatcgtgcgcctgccgcagggaaaagatgtggtgatcgacgccaaaatgacgctggtcgcctatgaacgctattttaacgccgaagacgactacacccgcgaaagcgcgctacaggaacatatcgcgagcgtgcgtaaccatatccgtttgctgggacgcaaagattatcaacagctgccggggctgcgaactctggattacgtgctgatgtttattcccgttgaacccgcttttttactggcgcttgaccgccagccggagctgatcaccgaagcgttgaaaaacaacatcatgctggttagcccgactacgctgctggtggcgctgcgcactatcgccaacctgtggcgttatgagcatcaaagccgcaacgcccagcaaatcgccgatcgtgccagcaagctgtacgacaagatgcgtttgttcatcgatgacatgtccgcgattggtcaaagtctcgacaaagcgcaggataattatcggcaggcaatgaaaaaactctctagtgggcgcggaaatgtgctggcgcaggcagaagcgtttcgcggtttaggagtagaaattaaacgcgagattaatccggatttggctgaacaggcggtgagccaggatgaagagtatcgacttcggagcgttccggagcagccgaatgatgaagcttatcaacgcgatgatgaatataatcagcagagccgctaacccattgggagtagttaagccgggtagaaatctagggcatcgacgcccaatctgttacacttctggaacaattttttgatgagcaggcattgagatggtggataagagtcaagaaacgacgcactttggttttcagaccgtcgcgaaggaacaaaaagcggatatggtcgcccacgttttccattccgtggcaagtaaatacgatgtcatgaatgatttgatgagttttggtattcatcgtttgtggaagcgattcacgattgattgcagcggcgtacgccgtgggcagaccgtgctggatctggctggtggcaccggcgacctgacagcgaaattctcccgcctggtcggagaaactggcaaagtggtccttgctgatatcaatgaatccatgctcaaaatgggccgcgagaagctgcgtaatatcggtgtgattggcaacgttgagtatgttcaggcgaacgctgaggcgctgccgttcccggataacacctttgattgcatcaccattagctttggtctgcgtaacgtcaccgacaaagataaagcactgcgtagtatgtatcgcgtgctgaaacccggcggccgcctgctggtgcttgagttcagcaagccaattatcgagccgctgagcaaagcctatgatgcatactccttccatgtgctgccgcgtattggcagtctggtcgcgaacgacgccgacagctaccgttatctggcagaatccatccgtatgcatcccgatcaggataccctgaaagccatgatgcaggatgccggattcgaaagtgtcgactactacaatctgacggcaggggttgtggcgctgcatcgtggttataagttctgacaggagaccggaaatgccttttaaacctttagtgacggcaggaattgaaagtctgctcaacaccttcctgtatcgcagtcccgcgctgaaaacggcccgcagccgtctgctgggtaaagtattgcgcgtggaggtaaaaggctttagcacgagtttgattctggtgttcagcgaacgccaggttgatgtactgggcgaatgggcaggcgatgctgactgcaccgttatcgcctacgccagtgtgttgccgaaacttcgcgatcgccagcagcttaccgcactgattcgcagtggtgagctggaagtgcagggcgatattcaggtggtgcaaaacttcgttgcgctggcagatctggcagagttcgaccctgcggaactgctggccccttataccggtgatatcgccgctgaaggaatcagcaaagccatgcgcggaggcgcaaagttcctgcatcacggcattaagcgccagcaacgttatgtggcggaagccattactgaagagtggcgtatggcacccggtccgcttgaagtggcctggtttgcggaagagacggctgccgtcgagcgtgctgttgatgccctgaccaaacggctggaaaaactggaggctaaatgacgccaggtgaagtacggcgcctatatttcatcattcgcacttttttaagctacggacttgatgaactgatccccaaaatgcgtatcaccctgccgctacggctatggcgatacagtttattctggatgccaaatcggcataaagacaaacttttaggtgagcgactacgactggccctgcaagaactggggccggtttggatcaagttcgggcaaatgttaagtacccgccgcgatctttttccaccgcatattgccgatcagctggcgttattgcaggacaaagttgctccgtttgatggcaagctggcgaagcagcagattgaagctgcaatgggcggcttgccggtagaagcgtggtttgacgattttgaaatcaagccgctggcttctgcttctatcgcccaggttcataccgcgcgattgaaaagcaatggtaaagaggtggtgattaaagtcatccgcccggatattttgccggttattaaagcggatctgaaacttatctaccgtctggctcgctgggtgccgcgtttgctgccggatggtcgccgtctgcgcccaaccgaagtggtgcgcgagtacgaaaagacattgattgatgaactgaatttgctgcgggaatctgccaacgccattcagcttcggcgcaattttgaagacagcccgatgctctacatcccggaagtttaccctgactattgtagtgaagggatgatggtgatggagcgcatttacggcattccggtgtctgatgttgcggcgctggagaaaaacggcactaacatgaaattgctggcggaacgcggcgtgcaggtgttcttcactcaggtctttcgcgacagctttttccatgccgatatgcaccctggcaacatcttcgtaagctatgaacacccggaaaacccgaaatatatcggcattgattgcgggattgttggcagcctaaacaaagaagataaacgctatctggcagaaaactttatcgccttctttaatcgcgactatcgcaaagtggcagagctacacgtcgattctggctgggtgccaccagataccaacgttgaagagttcgaatttgccattcgtacggtctgtgaacctatctttgagaaaccgctggccgaaattagctttggacatgtactgttaaatctgtttaatacggcgcgtcgcttcaatatggaagtgcagccgcaactggtgttactccagaaaaccctgctctacgtcgaaggggtaggacgccagctttatccgcaactcgatttatggaaaacggcgaagcctttcctggagagctggattaaagatcaggtcggtattcctgcgctggtgagagcatttaaagaaaaagcgccgttctgggtcgaaaaaatgccagaactgcctgaattggtttacgacagtttgcgccagggcaagtatttacagcacagtgttgataagattgcccgcgagcttcagagtaatcatgtacgtcagggacaaagccgttattttctcggaattggcgctacgttagtattaagtggcacattcttgttggtcagccgacctgaatgggggctgatgcccggctggttaatggcaggtggtctgatcgcctggtttgtcggttggcgcaaaacacgctgattttttcatcgctcaaggcgggccgtgtaacgtataatgcggctttgtttaatcatcatctaccacagaggaacatgtatgggtggtatcagtatttggcagttattgattattgccgtcatcgttgtactgctttttggcaccaaaaagctcggctccatcggttccgatcttggtgcgagcatcaaaggctttaaaaaagcaatgagcgatgatgaaccaaagcaggataaaaccagtcaggatgctgattttactgcgaaaactatcgccgataagcaggcggatacgaatcaggaacaggctaaaacagaagacgcgaagcgccacgataaagagcaggtgtaatccgtgtttgatatcggttttagcgaactgctattggtgttcatcatcggcctcgtcgttctggggccgcaacgactgcctgtggcggtaaaaacggtagcgggctggattcgcgcgttgcgtagtctggcgacaacggtgcagaacgaactgacccaggagttaaaactccaggagtttcaggacagtctgaaaaaggttgaaaaggcgagcctcactaacctgacgcccgaactgaaagcgagcatggatgaactacgccaggccgcggagagcatgaagcgttcctacgttgcaaacgatcctgaaaaggcgagcgatgaagcgcacaccatccataacccggtggtgaaagataatgaagctgcgcatgagggcgtaacgcctgccgctgcacaaacgcaggccagtagcccggaacagaagccagaaaccacgccagagccggtggtaaaacctgctgcggacgctgaaccgaaaaccgctgcaccttcccctagcagcagtgataaaccgtaaacatgtctgtagaagatactcaaccgcttatcacgcatctgattgagctgcgtaagcgtctgctgaactgcattatcgcggtgatcgtgatattcctgtgtctggtctatttcgccaatgacatctatcacctggtatccgcgccattgatcaagcagttgccgcaaggtagtacgatgatcgccaccgacgtggccagcccgttctttacgccgatcaagctgacctttatggtgagcctgattctgagtgcgccggtgattctctatcaggtgtgggcatttatcgccccagcgctgtataagcatgaacgtcgcctggtggtgccgctgctggtttccagctctctgctgttttatatcggcatggcattcgcctactttgtggtctttccgctggcatttggcttccttgccaataccgcgccggaaggggtgcaggtatccaccgacatcgccagctatttaagcttcgttatggcgctgtttatggcgtttggtgtctcctttgaagtgccggtagcaattgtgctgctgtgctggatggggattaccagcccagaagacttacgcaaaaaacgcccgtatgtgctggttggtgcattcgttgtcgggatgttgctgacgccgccggatgtcttcagccaaacgctgttggcgatcccgatgtactgtctgtttgaaatcggtgtcttcttcagtcgcttttacgttggtaaagggcgaaatcgggaagaggaaaacgacgctgaagcagaaagcgaaaaaactgaagaataaattcaaccgcccgtcagggcggttgtcatatggagtacaggatgtttgatatcggcgttaatttgaccagtagccaatttgcgaaagaccgtgatgatgttgtagcgtgcgcttttgacgcgggagttaatgggctactcatcaccggcactaacctgcgtgaaagccagcaggcgcaaaagctggcgcgtcagtatagctcctgttggagtacggcgggcgtacatcctcacgacagcagccagtggcaagctgcgactgaagaagcgattattgagctggccgcgcagccagaagtggtggcgattggtgaatgtggtctcgactttaaccgcaactttagcacgccggaagagcaggaacgcgcttttgttgcccagctacgcattgccgcagatttaaacatgccggtatttatgcactgtcgcgatgcccacgagcggtttatgacattgctggagccgtggctggataaactgcctggtgcggttcttcattgctttaccggcacacgcgaagagatgcaggcgtgcgtggcgcatggaatttatatcggcattaccggttgggtttgcgatgaacgacgcggactggagctgcgggaacttttgccgttgattccggcggaaaaattactgatcgaaactgatgcgccgtatctgctccctcgcgatctcacgccaaagccaagttcccggcgcaacgagccagcccatctgccccatattttgcaacgtattgcgcactggcgtggagaagatgccgcatggctggctgccaccacggatgctaatgtcaaaacactgtttgggattgcgttttaaagtttgcggaactcggtattcttcacactgtgcttaatctctttattaataagattaagcaatagcatggagcgagcctcaccatcgggttcggtgaaaatggcctgaaagccttcgaacgcgccttcggtaataatcaccttatcacccggataaggggttgccggatcgacaatgtctttcggtttatatacgcttagctgatgaataaccgcgcttgggactatcgctgggctcgcgccaaagcgcacgaagtggctgacaccgcgggtcgcgttgatagtcgtggtatgaatcacttctgggtcaaattccacaaacaggtagttggggaacaatggctcactgactgcagtacgttttccacgcacgattttttccagggtgatcatcggtgccaggcaattcacagcctgtctttcgaggtgttcctgggcacgttgaagttgcccgcgcttgcagtacagtaaataccaggattgcataatgactcttatccgtttaatcggggcgcaaggatagcaaaagctttacgctaagttaattatattccccggtttgcgttataccgtcagagttcacgctaatttaacaaatttacagcatcgcaaagatgaacgccgtataatgggcgcagattaagaggctacaatggacgccatgaaatataacgatttacgcgacttcttgacgctgcttgaacagcagggtgagctaaaacgtatcacgctcccggtggatccgcatctggaaatcactgaaattgctgaccgcactttgcgtgccggtgggcctgcgctgttgttcgaaaaccctaaaggctacagtatgccggtgctgtgcaacctgttcggtacgccaaagcgcgtggcgatgggcatggggcaggaagatgttagcgcgctgcgtgaagttggtaaattattggcgtttctgaaagagccggagccgccaaaaggtttccgcgacctgtttgataaactgccgcagtttaagcaagtattgaacatgccgacaaagcggctgcgtggtgcgccctgccaacaaaaaatcgtctctggcgatgacgtcgatctcaatcgcattcccattatgacctgctggccggaagatgccgcgccgctgattacctgggggctgacagtgacgcgcggcccacataaagagcggcagaatctgggcatttatcgccagcagctgattggtaaaaacaaactgattatgcgctggctgagccatcgcggcggcgcgctggattatcaggagtggtgtgcggcgcatccgggcgaacgtttcccggtttctgtggcgctgggtgccgatcccgccacgattctcggtgcagtcactcccgttccggatacgcttagtgagtatgcgtttgccggattgctacgtggcaccaagaccgaagtggtgaagtgtatctccaatgatcttgaagtgcccgccagtgcggagattgtgctggaagggtatatcgaacaaggcgaaactgcgccggaagggccgtatggcgaccacaccggttactataatgaagtcgatagtttcccggtatttaccgtgacgcatattacccagcgtgaagatgcgatttaccattccacctataccgggcgtccgccagatgagcccgcggtgctgggtgtcgcactgaacgaagtgtttgtgccgattctgcaaaaacagttcccggaaattgtcgatttttacctgccgccggaaggctgctcttatcgcctggcggtagtgacaatcaaaaaacagtacgccggacacgcgaagcgcgtcatgatgggcgtctggagcttcttacgccagtttatgtacactaaatttgtgatcgtttgcgatgatgacgttaacgcacgcgactggaacgatgtgatttgggcgattaccacccgtatggacccggcgcgggatactgttctggtagaaaatacgcctattgattatctggattttgccagccctgtctccgggctgggtagtaaaatggggctggatgccacgaataaatggccgggggaaacccagcgtgaatggggacgtcccatcaaaaaagatccagatgttgtcgcgcatattgacgccatctgggatgaactggctatttttaacaacggtaaaagcgcctgatgcgcgtttgttttgccctatttatcgatccgacagagaaagcgcatgacaaccttaagctgtaaagtgaccagcgtagaagctatcacggataccgtatatcgtgtccgcatcgtgccagacgcggccttttcttttcgtgctggtcagtatttgatggtagtgatggatgagcgcgacaaacgtccgttcagtatggctagcacgccggatgaaaaagggtttatcgagctgcatattggcgcttctgaaatcaacctttacgcgaaagcagtcatggaccgcatcctcaaagatcatcaaatcgtggtcgacattccccacggagaagcgtggctgcgcgatgatgaagagcgtccgatgattttgattgcgggcggcaccgggttctcttatgcccgcagcattttgctgacagcgttggcgcgtaacccaaaccgtgatatcaccatttactggggcgggcgtgaagagcagcatctgtatgatctctgcgagcttgaggcgcttagcttgaagcatcctggtctgcaagtggtgccggtggttgaacaaccggaagcgggctggcgtgggcgtactggcaccgtgttaacggcggtattgcaggatcacggtacgctggcagagcatgatatctatattgccggacgttttgagatggcgaaaattgcccgcgatctgttttgcagtgagcgtaatgcgcgggaagatcgcctgtttggcgatgcgtttgcatttatctgagatataaaaaaacccgcccctgacaggcgggaagaacggcaactaaactgttattcagtggcatttagatctatgacgtatctggcaaaccatgcccgatgcgacgctgtcgcgtcttatcgtgcctacaaatagtccgaaccgtaggccggataaggcgtttacgccgcatccggcaattggtgcatgatgcctgatgcgacgctgtcgcgtcttatcgtgcctacaaatagtccgaaccgtaggccggataaggcgtttacgccgcatccggcaattggtgcatgatgcctgatgcgacgctggcgcgtcttatcaggcctacattggtgccggatcggtagaccggataaggcgttcacgccgcatccggcaagtggttaaacccgctcaaacaccgtcgcaataccctgacccagaccgatacacatcgtcgccagaccaaactgaacgtctttgcgttccatcagattcagcagcgtggtgctgatacgcgcaccggaacaacccagcggatgacccagcgcgatcgcgccaccgttgaggttgatcttctcgtcaatctgctcaattagtcccagatctttaatacatggcaggatctgcgcggcaaaggcttcgttcatttcaaacacgccgatatcgctggcagaaagccccgcttttttcagcgccagtttgctggccggaaccgggccgtaacccataatgcttgggtcacaaccaacgaccgccatgctacgcacacgagcgcgcggcttaagacctaattcatgggcgcggctttcactcatcaccagcatggcagctgcgccatcggaaagtgcagaagatgtgcccgccgttaccataccgtttactggatcaaacgccggacgcagcgtggcgagggcttccacggtggtttccgggcgaatcacttcgtcgtaattaaactgcttcaggacgccgtcggcatcgtgaccaccggtcgggatgatttcatttttaaatgcggcgctctgcgtggcggcccaggcgcgggcgtgactccgcgcggcaaaggcatcctgcatttcacggctgataccgtgcatacgcgccagcatttctgccgttaagcccatcatgcccgccgctttggcgacattgcggctcaggccggggtgaaaatcgacgccgtgactcatcggcacatggcccatatgctccacgccgccaaccagacatgcctgcgcatcgccagtcatgatcattcgtgctgcgtcatgcagtgcctgcatggaactaccacacaagcgattaacggtaaccgccgggacagagtgtggtacttctgccagcagcgccgcgttacgggcgatattaaaaccctgctccagcgtctgctgcacacaaccccagtaaatatcgtcgagggccgccgcttccagcgccgggttacgcgccagcaggctacgcattaaatgagcggagagatcttctgcacgcacgttacgaaaagcaccgcccttgctacggcccatcggggtgcgaattgcatcgacaatgacaacctgttccattgtgactccttaagccgttttcaggtcgccaaccggacgggctggctcaaccggaggatagtacggttcgttatgacgcgctttattacgcagaccttccggcacttcatacagcgggccgaggtgctgatattgctgtgccatatcgaggtattttgcgctaccgagggtgtccagccagcggaacgcgccgccgtggaacggagggaagcccaggccgtagaccagcgccatatccgcttccgccggagtggcgataatgccttcctccagacagcgcaccacttcgttgaccatcgggatcatcatgcgggcgataatctcttcttcgctgaaatcgcgcttcggctggctcacttctgccagcaggtcttcaacggcggcgtcttcttctttcttcggcttacctttgctgtcttctttataacgccagaaaccgaggccgttcttctgaccaaagcggttggcatcaaacagcgcgtcgatggcatcgcggtaatctttctgcatccgctgcgggaagcctgctgccatgacagcctgagcgtgatgcgcggtatcaatgcccacaacgtccagcagatatgccgggcccatcggccagccaaactgtttttccatcactttgtcgatcttgcggaaatccgcgccgtcgcgcagcagctggctgaaaccggcgaaatacgggaacagcacgcggttaacaaagaagccggggcagtcgttaaccacaatcggcgtcttgcccatcttgctcgcccaggcgacaactttcgcgatggtttcgtcggagcttttctcgccgcgaataatttctaccaacggcattcggtggaccgggttaaagaagtgcatcccgcagaagttttccgggcgttccagcgcgttggccagttcgctgataggaatggtactagtgttagacgccagcacggtatcctggcgtactttttgttcggtttctgccagtacggcttttttcactttcgggttttcaacaaccgcttctaccacaatatccacgcggtcaaatccggcgtagtcgagcgttgggtggattgtggagatcacgccagccagtttcagaccatcgatcttgccgcgctcaagctgcttgttcagcagtttcgcggcttcggtcatgccgagggttaagctcttgtcgttgatatctttcatgacaaccggcacgcctttccacgcagactggtaagcgatgccgccgcccataatgcctgcacccagcaccgcggcctgtttcggggtttcaacgtctttggtgagtttcttcgctttgccttttacatattgatcgttaaggaaaatgccgaccagtgcgcgggcttcgttggtatgcgccagcgggacaaaacttttgttttccaggtttaaggcttcttcacgaccaaaacgggccgcagcttcaatggtttttactgcggtgatgggggccggataatgtttccccgctgtttgtgcgaccatccctttagcgatggtgaagctcatggtggcttcaatcttgctcagttttagtggttccagcttcggctgacgttttgctttccagtcgaggtcgccgttaatggcctggcgtaaaaccgcctttgcgccttcaaccagtttttctgctttgactacgccatccaccagaccgattttcagcgcctgatccgcgccgacatctttaccggcggcaatgatttccagcgcactgtcagcgcccagcatacgtggcatacgtacagaaccgccaaagccaggcatgatgcccagtttggtttccggcagaccgatgcgcagatccggcgtcgccagacgataatcggtcgccagcacgcattcgcagccaccgcccagcgcatagccattgacggcagcaatggtcggcaccggcagatcttccaggcgattaaacacgctattggcaaagtgcagccactgacttaactgttcttcaggaacgaggaacagggacaaaaattcggtgatatcagcaccgacgataaaggctgctttgttgctacgcagcagcagcccttttagatcactttgctgttccagcacgccgatggcctcgccgaggctggcgacggtcgcagtgtcgagtttattaacactacctggggcatcaaataccagttcggcaatgccatcttccagccagtcaaggtacagggtgtcgcctttgtaaagcatgtcagtctcctgaatccgcaaggtgatctggtcgtaccagatgagtcgaagtgtgtattttgtgttaaaaatatgcaaacaaaagattaaagaaatgccgatctgatcacgctcggcagaaatcacgctctggatgaacgatgtgctaagatgcggagacttaaggtcaaaaaaacagaagggtaaaaaatggaaagtctggccagcctctataaaaatcatatagctaccttacaagaacggactcgcgatgcgctggcgcgcttcaagctggatgcgttacttattcactccggcgagctgttcaatgtttttctcgacgatcatccctatccgtttaaagtgaacccgcaattcaaagcgtgggtgccggtaactcaggtgccaaactgctggttgctggtggatggcgtgaacaagccgaaactgtggttctatctgccggttgattactggcacaacgtcgaaccgctgccgacctctttctggactgaagatgtggaagtgatcgcgctgccgaaagccgatggcattggtagcctgctgcctgctgcgcgcggcaatatcggttatatcggtccggtgccggaacgtgcgctgcaactgggtattgaggccagcaacatcaacccgaaaggggttatcgactacctgcattactatcgctccttcaaaactgagtacgaactggcctgtatgcgtgaagcgcagaaaatggcggtcaacggtcaccgcgcggcagaagaagcgttccgttctggcatgagcgagttcgatatcaacattgcctatctgaccgcgaccggtcatcgtgataccgacgtaccttacagcaacattgtggcgcttaacgaacacgctgcggtactgcattacaccaaactggaccatcaggcaccggaagagatgcgcagcttcctgctggatgccggggcagaatataacggctatgcggctgacctgacccgtacctggagcgcaaaaagtgacaacgactacgcgcagctggtgaaggacgttaatgatgaacaactggcgctgatcgccaccatgaaagcaggcgtcagctatgtggattaccacatccagttccatcagcgcatcgccaaactgctgcgtaaacatcaaatcatcaccgatatgagtgaagaagcgatggtcgaaaacgatcttaccgggccgtttatgccgcatggtatcggccatccgctgggcctgcaggtgcatgacgtcgctggttttatgcaggatgatagcggtacgcacctcgcggcaccggcaaaatatccgtacctgcgctgcacccgtattctccagccgggcatggtgttaaccatcgaaccgggtatctacttcatcgaaagcctactggcaccgtggcgtgaagggcagttcagcaagcacttcaactggcagaaaattgaagcactgaaaccgttcggcggcattcgtatcgaagacaacgtggtgatccacgaaaacaacgtggaaaacatgacccgggatctgaaactggcgtgatggaaagctggttaattcctgcggcaccggtcacggtcgttgaagagatcaaaaagagccgcttcataacgatgttggcgcataccgatggcgttgaggcggcgaaagcgtttgttgaaagcgtgcgggcagaacaccccgatgcccggcaccattgcgtggcgtgggtcgcgggtgcgccggatgattctcaacagctgggtttctctgacgacggggagccggcgggaacggcaggtaaaccgatgctcgcccagctaatgggcagcggcgtcggggaaattaccgctgtggtagtgcgctactacggcggcatattgcttggcaccggtgggttagtgaaagcgtatggcggcggcgtgaatcaggcgctgcgccagctaacgacccaacgcaagacgccattaaccgaatatactttgcaatgtgaatatcatcagttaaccggcattgaagcgttgctggggcagtgtgacggcaaaattatcaacagtgattatcaggcattcgttctgctgcgggtggcgcttccggcggcgaaagtggctgaattttccgcaaagctggcggattttagccgtggtagtttgcaattgttagcgattgaagaataatccccacttcgttttgcagaactaaggaagcggcagagatgcattttcgcgccattacccgaatcgttggactactggtcatcttatttagtgggaccatgattatccctgggctggtagcactcatctaccgggatggagcgggccgcgcttttacccagaccttttttgtcgccctcgccattggctctatgctgtggtggccgaaccgcaaagagaaaggcgaacttaaatcccgtgaggggtttctgatagtggtgctgttctggaccgtgctgggtagcgtcggtgcgctcccttttatcttcagcgaaagcccgaacctcacgattaccgatgcgttttttgaatctttctctggcctgaccactacgggagccactacgctggtggggctggatagcctccctcacgccatcctcttttatcgccagatgctgcaatggtttggcgggatggggatcatcgtgttggcggttgcgatactgcctatcctcggcgtgggtgggatgcagctctatcgcgcagaaatgcccggcccgctgaaagataacaaaatgcgcccgcgaattgcggaaacggcgaaaaccctgtggttgatttatgtcttgctgaccgtcgcctgtgcgctggcgttgtggtttgccggaatggatgcctttgatgccatcggccatagctttgcgactatcgctattggcggcttcagcacacatgatgccagtatcggttatttcgatagcccgactattaacactatcattgctatcttcctgctgatctccggctgtaactacggtctgcactttagtctgttaagtgggcgtagtctgaaggtttattggcgcgatccggaatttcgcatgtttatcggcgtacagtttacgctggtggttatttgtaccctcgtactgtggtttcataatgtctacagtagcgcgctgatgacaattaaccaggcgtttttccaggtggtgagcatggcgacaaccgccgggtttacaactgacagcattgcccgctggccgctctttttgccggtactgcttttatgtagtgcctttatcggcggttgcgccgggagtacgggcggtggcctgaaggtgatccgcatcctgctgctgtttaagcaggggaaccgtgagctgaaacgactggtgcatccgaacgccgtctatagcattaagctggggaatcgcgcactgccggaacgtatcctcgaagccgtttggggatttttctccgcctatgcattggtgtttattgtcagtatgctggcgattatcgccacgggcgtggatgacttttctgcctttgcgagcgttgttgcgacattgaataacctggggccagggcttggcgtggttgctgataactttaccagtatgaacccggtggctaaatggatcctgattgccaacatgctgtttggtcgtctcgaggtctttacattgctggtgctctttaccccgactttctggcgtgaatgatggagtaatacgtgaaaacattaattcttttcagtacaagggacggacaaacgcgcgagattgcctcctacctggctagcgaactgaaagaactggggatccaggcggatgtcgccaatgtgcaccgcattgaagaaccacagtgggaaaactatgaccgtgtggtcattggtgcttctattcgctatggtcactaccatagtgcgttccaggaatttgtcaaaaaacatgcgacgcggctgaatagcatgccgagcgccttttactccgtgaatctggtggcgcgcaaaccggagaagcgtactccacagaccaacagctacgcgcgcaagtttctgatgaacagccaatggcgtcccgatcgctgcgcggtcattgccggggcgctgcgttacccacgttatcgctggtacgaccgttttatgatcaagctgattatgaagatgagtggcggtgaaacggatacgcgcaaagaagttgtctataccgattgggagcaggtggcgaatttcgcccgagaaatcgcccatttaaccgacaaaccgacgctgaaataagcataaagaataaaaaatgcgcggtcagaaaattattttaaatttcctcttgtcaggccggaataactccctataatgcgccaccactgacacggaacaacggcaaacacgccgccgggtcagcggggttctcctgagaactccggcagagaaagcaaaaataaatgcttgactctgtagcgggaaggcgtattatgcacaccccgcgccgctgagaaaaagcgaagcggcactgctctttaacaatttatcagacaatctgtgtgggcactcgaagatacggattcttaacgtcgcaagacgaaaaatgaataccaagtctcaagagtgaacacgtaattcattacgaagtttaattctttgagcgtcaaacttttaaattgaagagtttgatcatggctcagattgaacgctggcggcaggcctaacacatgcaagtcgaacggtaacaggaagaagcttgcttctttgctgacgagtggcggacgggtgagtaatgtctgggaaactgcctgatggagggggataactactggaaacggtagctaataccgcataacgtcgcaagaccaaagaggggtaccttcgggcctcttgccatcggatgtgcccagatgggattagctagtaggtggggtaacggctcacctaggcgacgatccctagctggtctgagaggatgaccagccacactggaactgagacacggtccagactcctacgggaggcagcagtggggaatattgcacaatgggcgcaagcctgatgcagccatgccgcgtgtatgaagaaggccttcgggttgtaaagtactttcagcggggaggaagggagtaaagttaatacctttgctcattgacgttacccgcagaagaagcaccggctaactccgtgccagcagccgcggtaatacggagggtgcaagcgttaatcggaattactgggcgtaaagcgcacgcaggcggtttgttaagtcagatgtgaaatccccgggctcaacctgggaactgcatctgatactggcaagcttgagtctcgtagaggggggtagaattccaggtgtagcggtgaaatgcgtagagatctggaggaataccggtggcgaaggcggccccctggacgaagactgacgctcaggtgcgaaagcgtggggagcaaacaggattagataccctggtagtccacgccgtaaacgatgtcgacttggaggttgtgcccttgaggcgtggcttccggagctaacgcgttaagtcgaccgcctggggagtacggccgcaaggttaaaactcaaatgaattgacgggggcccgcacaagcggtggagcatgtggtttaattcgatgcaacgcgaagaaccttacctggtcttgacatccacggaagttttcagagatgagaatgtgccttcgggaaccgtgagacaggtgctgcatggctgtcgtcagctcgtgttgtgaaatgttgggttaagtcccgcaacgagcgcaacccttatcctttgttgccagcggtccggccgggaactcaaaggagactgccagtgataaactggaggaaggtggggatgacgtcaagtcatcatggcccttacgaccagggctacacacgtgctacaatggcgcatacaaagagaagcgacctcgcgagagcaagcggacctcataaagtgcgtcgtagtccggattggagtctgcaactcgactccatgaagtcggaatcgctagtaatcgtggatcagaatgccacggtgaatacgttcccgggccttgtacacaccgcccgtcacaccatgggagtgggttgcaaaagaagtaggtagcttaaccttcgggagggcgcttaccactttgtgattcatgactggggtgaagtcgtaacaaggtaaccgtaggggaacctgcggttggatcacctccttaccttaaagaagcgttctttgaagtgctcacacagattgtctgatgaaaatgagcagtaaaacctctacaggcttgtagctcaggtggttagagcgcacccctgataagggtgaggtcggtggttcaagtccactcaggcctaccaaatttgcacggcaaatttgaagaggttttaactacatgttatggggctatagctcagctgggagagcgcctgctttgcacgcaggaggtctgcggttcgatcccgcatagctccaccatctctgtagtgattaaataaaaaatacttcagagtgtacctgcaaaggttcactgcgaagttttgctctttaaaaatctggatcaagctgaaaattgaaacactgaacaacgaaagttgttcgtgagtctctcaaattttcgcaacacgatgatgaatcgaaagaaacatcttcgggttgtgaggttaagcgactaagcgtacacggtggatgccctggcagtcagaggcgatgaaggacgtgctaatctgcgataagcgtcggtaaggtgatatgaaccgttataaccggcgatttccgaatggggaaacccagtgtgtttcgacacactatcattaactgaatccataggttaatgaggcgaaccgggggaactgaaacatctaagtaccccgaggaaaagaaatcaaccgagattcccccagtagcggcgagcgaacggggagcagcccagagcctgaatcagtgtgtgtgttagtggaagcgtctggaaaggcgtgcgatacagggtgacagccccgtacacaaaaatgcacatgctgtgagctcgatgagtagggcgggacacgtggtatcctgtctgaatatggggggaccatcctccaaggctaaatactcctgactgaccgatagtgaaccagtaccgtgagggaaaggcgaaaagaaccccggcgaggggagtgaaaaagaacctgaaaccgtgtacgtacaagcagtgggagcacgcttaggcgtgtgactgcgtaccttttgtataatgggtcagcgacttatattctgtagcaaggttaaccgaataggggagccgaagggaaaccgagtcttaactgggcgttaagttgcagggtatagacccgaaacccggtgatctagccatgggcaggttgaaggttgggtaacactaactggaggaccgaaccgactaatgttgaaaaattagcggatgacttgtggctgggggtgaaaggccaatcaaaccgggagatagctggttctccccgaaagctatttaggtagcgcctcgtgaattcatctccgggggtagagcactgtttcggcaagggggtcatcccgacttaccaacccgatgcaaactgcgaataccggagaatgttatcacgggagacacacggcgggtgctaacgtccgtcgtgaagagggaaacaacccagaccgccagctaaggtcccaaagtcatggttaagtgggaaacgatgtgggaaggcccagacagccaggatgttggcttagaagcagccatcatttaaagaaagcgtaatagctcactggtcgagtcggcctgcgcggaagatgtaacggggctaaaccatgcaccgaagctgcggcagcgacactatgtgttgttgggtaggggagcgttctgtaagcctgtgaaggtgtgctgtgaggcatgctggaggtatcagaagtgcgaatgctgacataagtaacgataaagcgggtgaaaagcccgctcgccggaagaccaagggttcctgtccaacgttaatcggggcagggtgagtcgacccctaaggcgaggccgaaaggcgtagtcgatgggaaacaggttaatattcctgtacttggtgttactgcgaaggggggacggagaaggctatgttggccgggcgacggttgtcccggtttaagcgtgtaggctggttttccaggcaaatccggaaaatcaaggctgaggcgtgatgacgaggcactacggtgctgaagcaacaaatgccctgcttccaggaaaagcctctaagcatcaggtaacatcaaatcgtaccccaaaccgacacaggtggtcaggtagagaataccaaggcgcttgagagaactcgggtgaaggaactaggcaaaatggtgccgtaacttcgggagaaggcacgctgatatgtaggtgaagcgacttgctcgtggagctgaaatcagtcgaagataccagctggctgcaactgtttattaaaaacacagcactgtgcaaacacgaaagtggacgtatacggtgtgacgcctgcccggtgccggaaggttaattgatggggttagccgcaaggcgaagctcttgatcgaagccccggtaaacggcggccgtaactataacggtcctaaggtagcgaaattccttgtcgggtaagttccgacctgcacgaatggcgtaatgatggccaggctgtctccacccgagactcagtgaaattgaactcgctgtgaagatgcagtgtacccgcggcaagacggaaagaccccgtgaacctttactatagcttgacactgaacattgagccttgatgtgtaggataggtgggaggctttgaagtgtggacgccagtctgcatggagccgaccttgaaataccaccctttaatgtttgatgttctaacgttgacccgtaatccgggttgcggacagtgtctggtgggtagtttgactggggcggtctcctcctaaagagtaacggaggagcacgaaggttggctaatcctggtcggacatcaggaggttagtgcaatggcataagccagcttgactgcgagcgtgacggcgcgagcaggtgcgaaagcaggtcatagtgatccggtggttctgaatggaagggccatcgctcaacggataaaaggtactccggggataacaggctgataccgcccaagagttcatatcgacggcggtgtttggcacctcgatgtcggctcatcacatcctggggctgaagtaggtcccaagggtatggctgttcgccatttaaagtggtacgcgagctgggtttagaacgtcgtgagacagttcggtccctatctgccgtgggcgctggagaactgaggggggctgctcctagtacgagaggaccggagtggacgcatcactggtgttcgggttgtcatgccaatggcactgcccggtagctaaatgcggaagagataagtgctgaaagcatctaagcacgaaacttgccccgagatgagttctccctgactccttgagagtcctgaaggaacgttgaagacgacgacgttgataggccgggtgtgtaagcgcagcgatgcgttgagctaaccggtactaatgaaccgtgaggcttaaccttacaacgccgaaggtgttttggcggattgagagaagattttcagcctgatacagattaaatcagaacgcagaagcggtctgataaaacagaatttgcctggcggcagtagcgcggtggtcccacctgaccccatgccgaactcagaagtgaaacgccgtagcgccgatggtagtgtggggtctcctcatgcgagagtagggaactgccaggcatcaaataaaacgaaaggctcagtcggaagactgggcctttcgttttatctgttgtttgtcggtgaacgctctcctgagtaggacaaatccgccgggagcggatttgaacgttgcgaagcaacggcccggagggtggcgggcaggacgcccgccataaactgccaggcatcaaattaagcagaaggccatcctgacggatggcctttttgcattggcgcagaaaaaaatgccggatgcgacgctggcgcgtcttatccagcctactcttgcttatccgttctgcttttgcatccactccaccacaaaatcagccagcccctcaacatcattaatatccagtaatgcgacatcaagattaagcggcacatcactggctacagcaataacatgcctgtctatcactaattcttcaggtcgatgtccggctccatcgcgaaacagcacaatctttgcgatctcttcatgcttaaacccttcgaccagaatcaaatccagcttactggtatccattcgacttgcgagaaactgtagatccagctcttcttcgtctggtgtttccgtcatcaaggcccatcgttgctggctggcaacgatggtttgtaccgcgccagccttgcgcagctcatagctatctttgcctggcttatcaacatccatatcatggtgcgtatgcttaatcagccctggacggatccctctggcgcataatgccgggatcagttttttcaaaagcgtagtttttccggtaccactccacgcggcaaaggcgagtaacggtatcatcgtttttcctgccatcgggcaagctcctctggcgtattcacgttaacaaatgcatctttatgatcgctgaaatcaaccgcatgaccgccagccagacgcataaataccattacccggcgttctcctgcttgcagatattccagtaataaaggctcaatagcgcggtttaccagagcaatagtcgggtgatcgcgttcaccgtcatggacccacacgacaggcgcatctttgcgctgatgattaagcctggctgctaaatcagggggaatgtaaggcgtatcgcacgggcaaaacaaaaaccactcaccagcttcctgctgcattacactaagcattcctgccagagggcctgggtaatccgccagactatcttcaatcactttcagaccgcttgcctgatagatttcctgatgacgattagcattaaccacgacgtgagagagctgcgtcataagcgcgtcagcgacatgttgccataatggtttgccgtttaattcaagcaatcctttatctacgccgcccattcgtctggctttaccgcctgccagcacaacgcctgttatcgtcgtcatcagattcaccgatatcgcctcttttattgtgggattgaccctgctaacgtgtctgtctcaagagtaaggagcatcactatgaaatgtaaacgtctgaatgaagttattgaactcctccagccagcctggcaaaaagagccagaccttaacctgctgcaatttttgcagaaactggcgaaagagagtggttttgacggcgaactggcggatttgacggatgacattctgatctatcacctgaaaatgcgtgattccgcgaaagatgcggtgatcccgggtttgcagaaagattatgaagaagacttcaaaacggcgctgttacgcgctcgcggcgtaattaaagagtaaaagcttgtaagcggcgccaccaaaatcatcgtgaaatgatatccttcgtcattcgtaatgttttccggatgatgggatgaataacagcgcttttactttccagacactacacccggataccatcatggacgctctgtttgagcatgggatccgggtggattccggtcttaccccgcttaacagctatgaaaaccgtgtctatcaatttcaggacgaagatcgtcgacgttttgtcgtcaaattttatcgccctgaacgttggacagccgatcaaatcctcgaagaacatcaatttgcgttgcagctggtaaatgatgaagttccggtcgcagcacctgtggcctttaacggtcagactttattgaatcatcagggattttatttcgctgtttttccaagcgtcggtggtcgccagttcgaagctgataatatcgatcagatggaagcggttgggcgttatttagggcgtatgcaccagacggggcgcaaacagctttttatccatcgcccgaccatcggtttgaacgaatatctcattgagccacgcaagctgtttgaggacgctacactgataccttccgggttgaaagcggcattcctgaaagcgacagatgagctgattgccgccgttacagcacactggcgggaagatttcaccgttctgcggctacatggagactgccacgccgggaatattctctggcgcgatggtccaatgtttgttgatctggatgatgcacgtaatggtccagccgttcaggatttgtggatgttgctcaatggcgataaagccgagcagcggatgcaactggaaactattattgaagcttatgaagaatttagcgagttcgacaccgctgaaatcggactgattgaacctttacgcgccatgcgtttggtttattatcttgcctggctaatgcggcgttgggctgatcccgcgttcccgaaaaatttcccgtggttaaccggggaagattactggctgcgacagacggcgacttttatagaacaggcaaaagttctacaagaaccccctttgcaattaacacctatgtattaatcggagagagtagatcatgaaaaagatttggctggcgctggctggtttagttttagcgtttagcgcaagcgcggcgcagtatgaagatggtaaacagtacactaccctggaaaaaccggtagctggcgcgccgcaagtgctggagtttttctctttcttctgcccgcactgctatcagtttgaagaagttctgcatatttctgataatgtgaagaaaaaactgccggaaggcgtgaagatgactaaataccacgtcaacttcatgggtggtgacctgggcaaagatctgactcaggcatgggctgtggcgatggcgctgggcgtggaagacaaagtgactgttccgctgtttgaaggcgtacagaaaacccagaccattcgttctgcttctgatatccgcgatgtatttatcaacgcaggtattaaaggtgaagagtacgacgcggcgtggaacagcttcgtggtgaaatctctggtcgctcagcaggaaaaagctgcagctgacgtgcaattgcgtggcgttccggcgatgtttgttaacggtaaatatcagctgaatccgcagggtatggataccagcaatatggatgtttttgttcagcagtatgctgatacagtgaaatatctgtccgagaaaaaataattcaatgtaaattacataaagcccgtgaatattcacgggctttttttattatttaataaatataaatacattctgataatgcatcctgccgctggacattatttcagcataagtggatattcaaagttttgctgttttatcagggaatatttatatgatacgtaagagtgctacaggtgttattgttgcgttagccgtaatctggggtggtggcacatggtacacaggtacgcaaattcagcctggtgtcgaaaaatttattaaagattttaacgatgctaaaaagaaaggtgaacatgcctacgatatgacgttaagttatcaaaattttgacaaaggcttttttaattcccgttttcaaatgcaaatgacattcgataacggtgcacccgatctcaatatcaagccaggccagaaagttgtatttgatgtggatgttgagcacggtccgttgcccatcacaatgttaatgcatggtaatgtcatcccagcactggcagcggcaaaagtgaacttagtgaataatgaactgacacaaccgctatttatcgccgcgaaaaataaaagccccgtggaagcgacattgcgattcgcgtttggtggcagtttctctacgacattagatgttgcccctgcagagtatggaaagttttcttttggtgagggccagtttacttttaatggtgatggtagtagtttgtctaacctggatattgaaggcaaagtcgaagatattgttctgcaattaagtccaatgaacaaagtaacggcaaaaagttttaccattgattctctggcgcgattagaagaaaagaaatttccggttggtgaaagcgagagcaaatttaatcagattaacattatcaatcacggggaagacgttgcccaaatcgatgctttcgttgcaaaaaccaggctggatcgcgttaaagacaaagattatatcaatgtcaatctcacctacgaacttgataagttaacaaaagggaatcagcaactcggtagtggtgagtggagtttgattgctgaatctattgatcccagtgcagtgcgccaatttatcatccagtataacattgcgatgcagaagcagcttgctgcacaccctgagttagcaaacgatgaagttgctctgcaagaagtgaatgctgcattgttcaaagagtatttaccgttattacaaaaaagtgagccgaccattaaacaaccggtaagatggaagaacgcactcggcgaactaaatgccaatctggatatcagtattgccgacccagccaaatctagtagttccacaaacaaagatatcaaaagcctcaattttgatgtgaagttaccgcttaatgtcgtcacagaaaccgcaaaacagcttaatttatctgaaggaatggatgcggaaaaagcgcaaaagcaggctgataaacaaatcagcgggatgatgacattaggtcagatgtttcagttaatcacgattgacaacaataccgccagcctgcagctgcgttatacaccgggtaaagttgtttttaacggacaggagatgagcgaagaagaatttatgtctcgtgccggacgttttgttcattaaaatactcactcgcctctgctcattcagaggcgagtaaaacttacttattctgacgctgactactcatgagagacgtcagaagccggtctttttcctgccacaaactgttcagccattgctgaaaatggcgcttaaagcttttgtcattgatgtagtcgccatgtaactcatcggcaataggctgtaaatccacatgtacgacaatccgcgtcagtttaccgcttaacatatcgaagaacggctgacggttattgtccggataacacagcgtaacattaagcagtttatcgaattgtttacccagtacatttagcgccatcgcaatgcctgccgcctttggtggcaacaagttttgaaaagtggagtgggtttgctgatgtttttcttgcgtgaaacgggagccttcaacgaaattgacaatggtggtgggatgcaggcgaaacttttcacaagaacgccgagtggtttcaacatctttaccacgtcgctccggatgacgtaataaataagcgcgggaataacgcttcataaacggcatatccaggctccagcacgccaggccaagaaatggcacccaggccagctgttgcttgaggaaatatttattcatcggaatgtgcttacgaaacagcacgcacagtacgacaatatctgcccaactacggtggttacaaataagcagataccagttcttcttacttaacccttccagcccgtgaacttcccattgaaggtgtgggttcagatgcagtaataccgccagaccttcacaccagcaatacatcataaaatcacaaaaacggctaacctttcgccaaatgactggcacaggtagcaatagttttacaatcccggcaatgatgatcgggacggaacaaaaaatagtgaccaaaatggtcaatacgatactcagcaaaagggttatcgcagcgagtattctcgtcataatgaatttattcaaaaggttagccatagacagtgcgctaaagaagcgcaaggcgcagattttagcagaaaacgacccaaataacggatgatccttaaggagaaaaataattcatatctatccacattagaaaaaatcccattatctcaattattagggatggatttatttttaactgcatgaaaaacaaagacaaacatcatgctgtaaaaagcatgataataaattaaaagcgatgtaaataatttatgcacaaagttatccacatgacgatttgcgagcgatccagaagatctacaaaagattttcacgaaaagcggtgaaaaactcatgttttcatcctgtctgtggcatcctttacccataatctgataaacaggcacggacattatggttcagatcccccaaaatccacttatccttgtagatggtagttcttatctttatcgcgcatatcacgcgtttcccccgctgactaacagcgcaggcgagccgaccggtgcgatgtatggtgtcctcaacatgctgcgcagtctgatcatgcaatataaaccgacgcatgcagcggtggtctttgacgccaagggaaaaacctttcgtgatgaactgtttgaacattacaaaagtcatcgcccgccaatgccggacgatctgcgtgcacaaatcgaacccttgcacgcgatggttaaagcgatgggactgccgctgctggcggtttctggcgtagaagcggacgacgttatcggtactctggcgcgcgaagccgaaaaagccgggcgtccggtgctgatcagcactggcgataaagatatggcgcagctggtgacgccaaatattacgcttatcaataccatgacgaataccatcctcggaccggaagaggtggtgaataagtacggcgtgccgccagaactgatcatcgatttcctggcgctgatgggtgactcctctgataacattcctggcgtaccgggcgtcggtgaaaaaaccgcgcaggcattgctgcaaggtcttggcggactggatacgctgtatgccgagccagaaaaaattgctgggttgagcttccgtggcgcgaaaacaatggcagcgaagctcgagcaaaacaaagaagttgcttatctcagttaccagctggcgacgattaaaaccgacgttgaactggagctgacctgtgaacaactggaagtgcagcaaccggcagcggaagagttgttggggctgttcaaaaagtatgagttcaaacgctggactgctgatgtcgaagcgggcaaatggttacaggccaaaggggcaaaaccagccgcgaagccacaggaaaccagtgttgcagacgaagcaccagaagtgacggcaacggtgatttcttatgacaactacgtcaccatccttgatgaagaaacactgaaagcgtggattgcgaagctggaaaaagcgccggtatttgcatttgataccgaaaccgacagccttgataacatctctgctaacctggtcgggctttcttttgctatcgagccaggcgtagcggcatatattccggttgctcatgattatcttgatgcgcccgatcaaatctctcgcgagcgtgcactcgagttgctaaaaccgctgctggaagatgaaaaggcgctgaaggtcgggcaaaacctgaaatacgatcgcggtattctggcgaactacggcattgaactgcgtgggattgcgtttgataccatgctggagtcctacattctcaatagcgttgccgggcgtcacgatatggacagcctcgcggaacgttggttgaagcacaaaaccatcacttttgaagagattgctggtaaaggcaaaaatcaactgacctttaaccagattgccctcgaagaagccggacgttacgccgccgaagatgcagatgtcaccttgcagttgcatctgaaaatgtggccggatctgcaaaaacacaaagggccgttgaacgtcttcgagaatatcgaaatgccgctggtgccggtgcttagtcgcattgaacgtaacggtgtgaagatcgatccgaaagtgctgcacaatcattctgaagagctcacccttcgtctggctgagctggaaaagaaagcgcatgaaattgcaggtgaggaatttaacctttcttccaccaagcagttacaaaccattctctttgaaaaacagggcattaaaccgctgaagaaaacgccgggtggcgcgccgagtacgagcgaagaggtactggaagaactggcgctggactatccgttgccaaaagtgattctggagtatcgtggtctggcgaagctgaaaagcacctacaccgacaagctgccgctgatgatcaacccgaaaaccgggcgtgtgcatacctcttatcaccaggcagtaactgcaacgggacgtttaagcagtaccgatcctaacctgcaaaacattccggtgcgtaacgaagaaggtcgtcgtatccgccaggcgtttattgcgccagaggattatgtgattgtcagtgcggactacagccagattgaactgcgcattatggcgcatcttagccgtgacaaaggcttgctgaccgcattcgcggaaggaaaagatatccaccgggcaacggcggcagaagtgtttggtttgccactggaaaccgtcaccagcgagcaacgccgtagcgcgaaagcgatcaactttggtctgatttatggcatgagtgctttcggtctggcgcggcaattgaacattccacgtaaagaagcgcagaagtacatggacctttacttcgaacgctaccctggcgtgctggagtatatggaacgcacccgtgctcaggcgaaagagcagggctacgttgaaacgctggacggacgccgtctgtatctgccggatatcaaatccagcaatggtgctcgtcgtgcagcggctgaacgtgcagccattaacgcgccaatgcagggaaccgccgccgacattatcaaacgggcgatgattgccgttgatgcgtggttacaggctgagcaaccgcgtgtacgtatgatcatgcaggtacacgatgaactggtatttgaagttcataaagatgatgttgatgccgtcgcgaagcagattcatcaactgatggaaaactgtacccgtctggatgtgccgttgctggtggaagtggggagtggcgaaaactgggatcaggcgcactaagattcgcctgaacatgccttttttcgtaagtaagcaacataagctgtcacgttttgtgatggctattagaaattcctatgcaacaactgaaaaaaaattacaaaaagtgctttctgaactgaacaaaaaagagtaaagttagtcgcgtagggtacagaggtaagatgttctatctttcagaccttttacttcacgtaatcggatttggctgaatattttagccgccccagtcagtaatgactggggcgttttttattgggcgaaagaaaagatccgtaatgcctgatgcgctatgtttatcaggccaacggtagaattgtaatctattgaatttacgggccggatacgccacatccggcacaagcattaaggcaagaaaattattcgccgtcctgcgtttcttctacaggctgcatctcgctaaaccaggtatccagtttctgccgcagcttgtccacgccttgtttcttcaagctagaaaacgtttcaacctgcacatcaccgttaaacgccagtacagcttcacgcaccatattcaattgcgctttacgtgcgccgcttgccagtttgtccgctttggtcagcagcaccagaacggcgatattgctgtctaccgcccactcaatcatctgctgatccaaatctttcagcggatggcgaatatccattagcaccaccagaccttgcaggctctgacgtttttcgaggtattcgccgagcgcacgctgccatttgcgcttcatctcttccgggacttccgcataaccgtacccaggcaagtcaaccagacgcttgccgtcagccacttcaaacaggttgataagctgggtgcgccctggggttttactggtacgagccaggcttttctggttagtcagcgtgttcagcgcgctggatttacctgcgttggaacggcctgcaaaagccacttcaattccggtatcggaaggtaggtggcgaatatcaggcgcactcatcacaaaatgcgtctgttgataattcaaattagtcaaagcggtcgtctccgtcagtcaaagctttgtggcgattatacctgaaccataataaaaggcggatttttcggcgtgagcgttgtaagtaaaagccatacgctttgtgagacattgccgatagtctttatgcgaaatagcagagaaaattctgcgatgcatgtcaaataagctatataaatcagtgaattgcttttatataaaactctgaaaatgtgcaaatactgatggcggttgattgtttgtttaaagcaaaggcgtaaagtagcacccatagagcgaggacgctaacaggaacaatgactcaggatgagggtcaggagcgccaggaggcgaagacagaggattgtcaggaagacaaacgtccggagacgtaattaaacggaaatggaatcaacacggattgttccggctaaaggaaaaacagggtgtgttggcggcctgcaaggattgtaagacccgttaagggttatgagtcaggaaaaaaggcgacagagtaatctgtcgccttttttctttgcttgctttctgttagattccgccgcaaatctatactgaataaaacggctaaaagacgaaccattatgaaaccaagttctagtaacagtcgcagcaaaggtcatgcaaaagcgcgtcgaaaaacacgcgaggagctggatcaggaagctcgtgatcgcaagcgtcagaaaaaacgtcgtggtcatgcgccgggcagccgcgcagcgggcggaaacaccacgagtggcagcaaaggccagaacgcaccaaaagatccacgtattggcagtaaaacccctattccattgggcgtgactgaaaaagtcaccaaacagcacaaaccgaagagtgagaaacctatgcttagtccgcaggcggagttggaattactggaaacggatgagcgtctggatgcgctgctggaacgtctggaagcaggcgaaaccctgagtgccgaagagcaatcctgggtggatgctaaactggatcgtattgatgagttgatgcagaaactcggcctctcttatgacgatgacgaagaagaggaagaagacgagaagcaagaagacatgatgcgtctgctgcggggcaactaacggattgccgccgtgggccttcccgttctgctgataacccttccggttatatgttatctggtgtggttattcgttaaactacagcggttgtcgcggcgacaaaagtggctgcgcaaccggctgatgacccgaaacgggcatccgccggtacgccgtagccgccagagacgccatcggaaggagtgagcatgtctgtacagcaaatcgactgggatctggccctgatccagaaatataactattccgggccacgatacaccagctacccgaccgcgctggagtttagtgaagacttcggcgaacaggcgtttttacaagccgtggcgcgctatcctgagcgtccattatctctctacgtacatatcccgttctgccataagctttgttacttctgcggttgcaataagattgttactcgccagcagcacaaggccgatcagtatctggacgcgctggagcaagaaatcgtccatcgtgcaccgctgttcgccgggcgtcacgtcagccaattgcactggggcggcggaacgccgacgtatctgaataaagcgcaaatcagccgcctgatgaagctgctgcgcgaaaacttccagttcaatgccgatgcggagattagcatcgaagtcgatccgcgggaaatcgaactggatgtactcgatcatttacgcgccgaaggctttaatcgcctgagcatgggcgtgcaggacttcaacaaagaagtgcaacgtctggttaaccgcgagcaggatgaagagttcatctttgcactgcttaaccatgcgcgtgagattggttttacctccaccaacatcgacctgatttacggcctgccgaaacagacgccggagagtttcgcctttaccctgaaacgtgtggcggagctgaaccccgatcgtctgagtgtctttaactacgcgcatctgccgaccatttttgctgctcagcgcaaaatcaaagatgctgacctgccgagtccgcagcaaaaactcgatatcctgcaggaaaccatcgccttcctgacgcaaagcggctatcagtttatcggtatggatcactttgcccgtccggatgacgagctggcggtggcccagcgtgaaggcgtgctgcatcgtaacttccagggctacaccactcagggcgataccgatctgctggggatgggcgtttccgccatcagcatgattggcgactgctacgcgcagaaccagaaagagttgaagcagtactatcagcaagtggatgaacaaggcaatgcgctgtggcgtggtattgcgctaacgcgtgatgactgtattcgccgcgatgtgattaagagcctcatctgcaacttccgtctggattacgcccctattgagaaacagtgggatttgcacttcgctgattactttgcggaagatctcaagctgctcgccccgttagcaaaagatgggctggtggatgtggatgagaagggaatacaggtgacggcgaaaggtcgcttgctgatccgcaacatttgcatgtgctttgatacctatctgcgccagaaagcgcggatgcagcagttctctcgggtgatttaaatagtgaatggcgcttcgtttacaaagtagaaaacgaaagcgccatcaatgtgctgagaacaagattgcctgatgcgctgggcaacaaaacctgttgaaattattgcttttgtaggccggataaggcgtttacgccgcatcaggcatctgagcatgatgcctgatgcggcgctggtcgcgtcttatcaggcctacgactttctccgcatccggcataaacaacgagcttcagctaaacagcccaatcattgcggcacacagcacggcagcaacggcagtttgcggtgtgtggctgtcaactgcgccactcgataccagattaattattgattccagcataatgactctccccgttttccgggcaagatcatactgaacttatcggaacagtaaagcgtaaaataccagcaatttgcgctcaataatcaatctttacacacaagctgtgaatcactccatccccagctcttttaacttacgcgtcagggtgttgcggccccagccgagtagccgcgccgcttcctgtttatgcccctgcgtatgtcgcaacgcggtcgtcagtaacgtccgctccagctctggctgcgcttcggaaagcagattttgatgaccggaacgcagcgctctgtctgcccactgcgcaagaagcgtcgcccagctgtccggttgcatttggctagtactctccgcaaccgtactttcaaacagttcgccgggcaaatcctgaatcaacacttcctgcccggcggccatcaccgttagccagcggcaggtgttttccagctggcgcacgttgcctggccacgccagacgcgtcagagcagcttcggtttccggatgcagtaacttcgcttctacgcccagttcgcgcgcggcaacctgtaaaaaatggcgcgccagacggggaatatcttcccgacgttcgcgcagcggcggcagatgaacgcggataacgttcaggcggtggaacagatcctcacggaacttaccttcctgcactcgctgttcgagattctggtgagtggcagcgataatccgcacatccactttcaccggcgcatagccgccaacgcggtaaaactgaccgtctgccagcacgcgcagcaaacgcgtctgcacatccagcggcatatcaccaatttcgtcgaggaataatgtaccgccatcggcctgttcaaaacgcccctgacgaatggtattcgcgccagtaaacgcgcctttctcgtggccaaacagttcactttcgatcaaatcttttgggatagctgccatattcagcgcgataaacggcgctttggcgcgcggactgtggcgatgcagggcatgagcgaccagttctttaccggtgccggattcgccgttaatcagcacgctaatagaagaacggctaagccgaccgataatacggaacacgtcctgcatggctggcgcttcgccgatgatatcggtcgttgggccgttaagctgaacattacgcggctgctgctgttcctggtaatgactgatagcgcgctcaaccagcgccactgcttcgtcgatatcaaacggtttgggcagataatcaaacgccccttgttgataggcgctgacggcagcatccagatcggaatgtgcggtcataatgatgaccggaagcattggatggcgctgtttaatctgcttgagcagcgccagcccgtccattcccggcatacggatatcactaagcagcacatccggcgttttgctcgccagcgcctccagcacttctgcgccgttctcaaacgtcgtacaggttaaacctgccccagcgagcgcacgttcaagcacccaacggatggaactatcgtcatcgactacccagactatccctcgttgcataaacgtcacctttatttcctgataggcaggtaaacgctgaactcggtatgccctggccaactggtaaattcaattttgccactatgctgatcaatcaaattacgagcgatggataagccaagcccggtgccaccttcgcggccgctgaccatcgggtaaaacagcgtatcctgcaaatgaggcggaatgcccggcccgttatcttccacatcaatccgcgccgccagccggtagcgctcgccgtgtaaggtcagttgaaacgcggtgcgggtacgcagaatgatttcaccgccttccggccccagcgcctgtagcgcattgcgcacaatattcagcaagacctgttcaatttgatccgggtcgtgcgccagttccggtaggctgggatcgtaatcacgaatcaaccgcacgttgtccggcagttccatgctcaccagcgttaccacgcgttcagccactttgtgaatactttcggtaacgcgcgtaccgggcagctgcggccccaacagacggtcgaccagatttcgcagccggtccgcctgttcgataatcactttggtatattcgagtagacttgggtcaggtaacgctttgctgagcagctgcgccgcgccacgtaaaccgccaagcggatttttaatctcatgtgccaggccgcgcactaaatcacgggcagcaacctgctgggcgtgctgtagctgttcctgacttaagcggcgctggttatccatcggagccatctccagcaggatcatgccgtccggcatacgctgggccgtcacagaaaggatatggctgcgcccgtcgatgaccagcgtcacttcgttatcggtaaaaccttgccccgcctccagactttcttgcatcagctcgatatttaaactgaagtagctcaacagttccggtaacggtgtaccaaacaatttgcgggagctttgggcgagcagttgttgcgcggcagggttggcgtaatggatcgccaggttgtcatcgattaacaaaatactgttaatcaggctgttgaggatctgcccagcatcgggctgcgtgcctgttgccataaagcagtctcctgaacaggttgcaccattttagtgcattatagctttttacggataaaaagcgcgaagcatcagagaattgacggagaaaaaagcccatgcagagatgggctacagatagctgacaaacttcacgttggagagcgactcacctgctccggcctaccacatcatcaccgtgtaggccggataagacgcatttgcgtcgcatccggcgtgatgtgcttgccaccgatcccaggcctgccagagacaggcgaaaagtttccacggcaactaaaacacttagacgctgtagtacagctcaaactctaccggatgcggagtcatacgcacgcggtcatcttcttcgcgacgcagagcgatgtacgcatcaattgcttcgtcagtgaacacgccaccggctttcaggaactcgcggtccagatccagttcgttcagtgcttcttccagagagcctgcaacctgtgggatctctttcgcttcttctggcggcaggtcatacaggtttttgtccatggcttcgcccggatggatcttgttcttgataccatcaagaccggccatcagcagggcagcaaagcacaggtacgggttagctgccggatccgggaaacgtacttcgatacgacgtgctttcggagaagaaaccaccggaatacggatagacgcagaacggttacgcgcagagtaagccagcattaccggtgcttcatagcccgggaccagacgcttataagagttggtggtcgggtttgccagggcgttaatcgctttagcgtgtttgattacgccgccaatgtagtacagcgcctgctcagacagacctgcgtatttgtcgcctgcgaacaggttaacgccgtttttagacagagacatgtggcagtgcataccggagccgttatcaccgaacatcggttttggcataaaggtcgcggttttaccgaagcggtgcgctacgttgtgcacaacatatttgtagatctgaatttcgtcagcttttttggtcatggtattgaagcgggtagccacttcgttctgaccagcagtcgctacttcgtggtgatgggcttcaaccaccagacccatctgttccatcaccagacacatttcagaacgaatatcctgagcgctgtctaccggtggaaccgggaagtaaccgcctttcactgccggacggtgacctttgttaccaccttcgtattgggtggaggagttccatgcgccttcgatatcgtcgatagcaacgtgggaaccggagatagaacttccgaaacggatgtcatcgaacaggaagaattcaggttctggcccgaacagtacggtgtcggcaatgccagtggaacgcaggtaatcttcggcgcgcttcgcaatggagcgcgggtcacggtcatagccttgcagggtgccaggttcaaggatgtcgcaacggataatcagggtggagtcggcgaagaacgggtcaatcactgcggtggatgcgtctggcatcagcaccatgtcggactcgttaatgcctttccagccgccaatgctggagccgtcaaacattttgccttcttcgaagaattcagcattcacctgatgagcagggatagtgacgtgctgttctttacctttagtatcggtgaagcgcaaatcaacaaacttcacttcgtgctcgttcagcatcgtcagtacgtgttcagcggacatactttaactctcctggattggtcatggtcgtcgtggtaacgaaatctgcaattattttggccgtgtcgccgtaaaaaagataaagcgaaatctgtgccaacttttaaattgcccctaaaaggcgttatcatgcgcaccatcgtgcaaaagggctgcaccacgatgtgaatgttgcaccaatatagtgcttcaatggaaacattaagcaccatgttggtgcaatgacctttggataaccctttttatgctccgtgaaagcgatcacaaagggactctgcaatacttgtttgcggaggatgtttgtgatcctgttttgtagtgcgattaatccgtgtacaataacgcgctatttctaatgcctgaggcaaagttgtgatcgaaaaattgcgtaatatcgccatcatcgcgcacgtagaccatggtaaaaccaccctggtagacaagctgctccaacaatccggtacgttcgactctcgtgccgaaacccaagagcgcgtgatggactccaacgatttggagaaagagcgtgggattaccatcctcgcgaaaaacaccgctatcaaatggaatgattaccgtatcaacatcgttgataccccggggcacgccgacttcggtggtgaagttgaacgtgtaatgtccatggtagacagtgtgctgctggtggttgacgcatttgacggcccgatgccgcaaacgcgcttcgtaaccaaaaaagcgtttgcttacggcctgaagccgattgttgttatcaacaaagttgaccgccctggcgcgcgtcctgattgggttgtggatcaggtattcgatctgttcgttaacctcgacgcgaccgacgagcagctggacttcccgatcgtttacgcttctgcgctgaacggtatcgcgggtctggaccacgaagatatggcggaagacatgaccccgctgtaccaggcgattgttgaccacgttcctgcgccggacgttgaccttgacggtccgttccagatgcagatttctcagctcgattacaacagctatgttggcgttatcggcattggccgcatcaagcgcggtaaagtgaagccgaaccagcaggtcactatcatcgatagcgaaggcaaaacccgcaacgcgaaagtcggtaaagtgctgggccacctcggtctggaacgtatcgaaaccgatctggcggaagctggcgatatcgttgcgatcacgggccttggcgaactgaacatttctgacaccgtttgcgacacgcaaaacgttgaagcgctgccggcactctccgttgatgagccgaccgtttctatgttcttctgcgttaacaccagcccgttctgcggtaaagaaggtaagttcgtaacgtctcgtcagatcctggatcgtctgaacaaagaactggtacacaacgttgcgctgcgcgtagaagaaaccgaagacgccgatgcgttccgcgtttctggtcgtggcgaactgcacctgtctgttctgatcgaaaacatgcgtcgtgaaggtttcgaactggcggtatcccgtccgaaagttatcttccgtgaaatcgacggtcgtaaacaagagccgtatgaaaacgtgactctggacgttgaagaacagcatcagggttctgtaatgcaggcgctgggcgaacgtaaaggcgacctgaaaaacatgaatccagacggtaaaggccgcgtacgtctcgactacgtgatcccaagccgtggtctgattggcttccgttctgagttcatgaccatgacttccggtactggtctgctgtactccaccttcagccactacgacgacgtacgtccgggtgaagtgggtcagcgtcagaacggcgtactgatctctaacggtcagggtaaagcggtcgcgttcgcgctgttcggtctgcaggatcgcggtaagctgttcctcggtcacggtgcagaagtttacgaaggtcagattatcggtattcatagccgctctaacgacctgactgtaaactgcctgaccggtaagaaactgaccaacatgcgtgcttccggtactgacgaagccgttgttctggttccgcctatccgcatgactctggaacaagctctggagttcatcgatgatgacgaactggtagaagtgactccgacctctatccgtattcgtaaacgtcacctgacggaaaacgatcgtcgccgcgccaaccgcgcaccgaaagacgattaatttcgttttttagtcataaaaaacctgccagcgatggcaggtttttttttgcctgtcgtgagcgcacaccaatgcgagtatctcccttataagtctgtggttacgtcaatagagagctttgtcacaattatctgcaaagtcatacgccgttaattgctttcttttttggcgtaagcgtaagatgcttcatctggtttaaaccaaaaggattaaacaatggcggagaatcaatccaccgtagaaaatgcaaaagagaaactggatcggtggttgaaagatggcatcaccacgccgggtggaaaactccctagtgaaagagagctgggagaactgctgggcattaaacgtatgacgctgcgccaggcgttgttgaacctcgaggcagaatccaaaatcttccgtaaggatcgtaaggggtggttcgtgacccagccgcgatttaattacagtccggagctgagcgcgagctttcagcgggccgcaattgagcaagggcgagagccttcctgggggtttaccgagaaaaaccgtaccagcgatattcccgagacgctcgcgccactgattgcagtgacgccaagtactgaactctatcgcatcaccggctggggggcgctggaaggacataaagttttctatcacgaaacatatattaatcctgaagttgctccgggctttattgaacaacttgaaaaccacagtttttctgcagtctgggaaaagtgctaccaaaaagagacggtagtaaaaaaattgattttcaaacccgtcagaatgccgggcgatatcagcaagtatcttggcggttctgcgggtatgccagcgatcttaattgaaaagcatcgcgccgaccagcaaggcaatattgtccaaatagatattgaatattggcgatttgaggccgtagacctcatcattaatctgtaagtgttttatggtgacaataaataacgcaagaaagattctacaacgtgtcgacactcttcctctttatttacatgcttatgcctttcatttaaatatgcggctggaaagagtgttgcctgctgatttacttgatatcgcaagtgaaaataatctacgtggcgtcaaaatccatgttctcgatggcgagcgtttttctcttggtaatatggacgataaagaactctctgcctttggggataaagcccgccgtctgaaccttgatattcatattgaaaccagcgccagtgataaggcatctattgacgaagccgtcgccatcgcgttgaaaactggggcaagctccgtacgtttttatccacgttatgaaggtaatttgcgcgacgtattaagcattatcgctaacgacattgcctatgtacgggaaacgtatcaggacagcggcctgacttttacgatcgagcagcatgaagatttaaaaagtcatgagctggtgagcctggtcaaagaaagtgagatggaatctctttccttactgtttgattttgcgaacatgatcaatgcaaatgagcatcccatcgacgctttaaaaacgatggcaccgcatattacccaggtccatatcaaagatgccttgatcgttaaagaaccgggtggcctgggtcataaagcctgtattagtggtcagggtgatatgccgttcaaagcgttattaacgcaccttatctgcctgggtgatgatgagccgcaggtgacggcatatggcctggaagaagaggttgattactatgcgccggcgttccgctttgaagacgaagatgataatccgtggatcccttatcgccagatgagtgaaacaccattgccagaaaatcatttactggatgcgcggttacgtaaagaaaaagaagatgcaattaatcagataaatcatgtgcgtaacgtactacaacaaatcaaacaagaggcaaaccatcttctgaaccactaataagttttaactcatacgcagttaataaaaccattccatatgaatggtcggtatcttattgcctttaaaacagtgattttaaaaatcgcttaggggatgttatgctcacgaaaaagaaatgggcgttatttagtctattaacactgtgtggcggtacaatttataaattaccgagcctgaaagatgcgttttatatcccgatgcaggaatatttccatttgaccaatggtcaaattggtaatgctatgagcgtaaacagttttgtcaccacagtgggcttttttctgtctatttattttgccgataaactaccgcgcagatacaccatgagtttcagtctcattgcgacaggattactgggtgtttatttgacgacaatgccggggtattggggcatcctctttgtctgggcgctatttggcgttacttgcgacatgatgaactggccggtcttgctcaagagcgtaagtcgattgggcaatagcgaacaacaaggtcggttgtttggcttcttcgaaacagggcgtggcattgtcgataccgtggtggcattttctgcgttggcagtatttacctggtttggcagtggcttattaggttttaaagcaggcatctggttctattcccttattgtgattgccgtaggcattattattttctttgtcctgaatgacaaagaagaggcaccgtccgttgaggtgaaaaaagaagacggagcaagcaaaaacaccagtatgaccagcgtgctgaaagacaaaactatctggcttatcgcttttaacgtcttcttcgtttacgcggtttactgtggcctgacattcttcattccattcctgaaaaacatctatctattgcccgttgcgctggtgggggcttacggcatcattaaccaatactgtctgaaaatgattggtggaccgattggtggcatgattagtgataagatcctgaaaagcccaagtaaatatctatgctacacctttatcattagtaccgctgcgctcgtactgttgattatgctgccgcacgaaagtatgccggtctatttagggatggcatgtacgctgggctttggcgcgatagtctttacacagcgagccgtattttttgcacctatcggcgaagcaaaaattgctgaaaataaaacaggtgcggcgatggcgttgggtagctttattggttacgctccggcgatgttctgcttcagtctgtatggctacattctggatttaaatccggggattattggctacaaaatcgtgtttggcattatggcctgcttcgcattcagtggtgcggtggtttccgtaatgctggttaagcgtattagccaacgtaagaaagagatgctggcggctgaagcttaattaatggccggatgtgcttaatccggccaacgaaaaccgtatcaaccgtaggccggataaggcgtttacgccgcatccggcagtttcacatcagaagaaatacttcgtcccgatacggatctggttttgctcgcggtggtacggttcgacgttgcggtctaaccagcgcaattcgaaataagggagccagtgttcattaatacggtaacggaaggtgttagtgatttcccaatgatgatctttcccgttgctactattaaagtcattcactcgcatgaagtaatgtggctcaaatgtataggaaaatttatcggtgattttaaaattccagtaggtgccaatttcataggtgtcattattatccagttccccgctcaaatctgtactactatagttattatggttatagcgatttcgtactgtcagattaaaccatggtacaaatttatagttgacgtccagatacactgcaccaccgctaccgatactcttatcattaattaagccaccgggctggatggttaatttatcggttggtttaaataacggataccagccttcaatttcgttatatccatgttttagttcatcttctcgctgaaagttgtaggtattggttaacataatacccgcgcccatatcgaagttataacccacacgtagcataacctcgccctgatcggaggcaagattatatgcctccctgttttcgacgtatgcgccagcaaatacgctggcagaggtcagagaagataataaaattattgcattaatctttttcataataagtccattttttaaacgtagggaggccgccacccaccaggatggaaatagcggctattgacatttataacgttacggaagccgttttttcttctgtcgccatctctttatttttgcgttggttgatttcctcaataatcaatgcaaaccgtttttcattgagtgtgtaaaagaatcccatcgtcaatgcagcaataattgccagtgcacaaggccagataaaaatgagctgacgcaaaccctgtaatgtcgcatcgctttgcgcgatgttgggaacataaccaatttgcgtcagcataatgcctggcaagaagccagcaagtgcggcagaaattttacgaaagaaggtataaccggtataaacagaaccttcggcacgaataccggttttccattcaccgtaatctacggtatctggtaccagtgcccagttcaggctgtttacaaaggccgtgccaaaaaaggcgacacaagagaacatgacgaaagtgaaagagttacttccccagaaataattcagtatatcacccaccgcccacagcaccatgccagccagataaacctgttttttaccaaaacattttacagttaatggcaccagtaatacgccgatgaggatgcatcccatactgaagaatcccatccagctcaataaattaatatcattcagcacatactgggtgtaatagacctgaatcgccagtttgatattaaatgccgccagggtacacaagttagcaatgcataaaaccagcaatggcggattccgaaatatcgcgcaaaaacttttgagaatactggctttatgtccggttggcgttgtgtccacataatgctctttgacgcctctgtagcacagcatcataaaaataaagccgccaatggagaacataagtgccgcacaggcataaccgacggtactgtcagaaaaaaggctctgcaacggaataaacgccacggtacaaatcaatagccctatggttgcaccaccctggcggtaagccgcgagctgcgcgcgctcattcgggtttttggtaattgccgggatcatcgcaccatagctgcagttcatcagactgtaactaagtccaaacatcataaacagcgcggtggcaatcgtcgttttaaccggcaaacaaaaggtggtggcgataaactggagcgttgcaattaacgccgccggaaccgctgcatataaaataaagggacgaaatttgcctttaggcccaatatttttccggctgtcgagtaaaaatccggtgagcatatcggtaaacgcggtaaaaaacttcgccaccagaaagataatcccgccatagtaagcaggcatccctaattcatcggtataaaatttgaggagatacagagtaccgatgcagagcattaaattgctaccgacgtcgcccataccataggcgattttttcccgcagattcagttttaatgtcagtggattatggtcagacataatcactccttataacgccccgcagggcgtcgtttattattattacgccgtgcgtttacgggcttctatctcttccacaatgcggacatacatcttctcgttcaggctgtagaagcaacccatcgccacaatggtgactaccgccagtgcgcttgggtagatgaagatcaactggcgtaacccttcaatggtgtggtcagcctgtgcgacgttcggcacatagccaatttgcgtcagcatccagccggggaagaaaccagccagcgcctgagacactttgcgaaagaaggtaaaaccggtgtagaccgttccttcgctacgcacgccggtgcgccactcgccgtactcgacggtgtcggaaaccagcgcccagttcaggctgttaacaaacgcactgccaaagaacgccaggcaggagaacgccacgaagctgacgctaccgccgccgaagaaatagttgagcagatcgcccagcacccaaatcagcaggccgccgatataaactttcttcttgccaaaacgtctgacactggcaggcatcaggaatacgccgatgaaaatacagcccatgctgaaaaatcccatatagctcaacaggatgggatcgttaagcacgtactgggtgtaatagacctggatggcgagcttgacgttaaacgcccctaaagtgcagaggttggcaatgcacagaatgaacagcgggcggttacccgcaattgcgcggaaagattgcagcaggcccggcttttgcgccggattagcaggctgggtttcgacataacgctctttcacgccgctgtagcagatccacataaacagcaggccaaacagactaaacagcgtggcggcgaagatatagccaagttgctgattaccttcgataagattcataactggcacgaatcccaccgtgcacagcagcaggcccagcgtagcgccgccctgacgccatgccgccagactggcgcgttcgttggggtttttggtgatagcgggaaccattgcgccgtaggagcagttcatcatgctgaaaaacagtccgtaaagcataaacagaatagtggccatcaccgttttaccggtgacatcaaacggtgtgccgacaaagttggcgatcgccagtaaggtgaccgggaaactcgcatacagaataaaaggacggaacttaccttttggaccgatcttgcgtcgggaatccaacataatgccggtacccatatcggtaaacgcagtaaagaatttactaatcaaaaagataatgccgccataggtgcctggcagccccagaacgtcggtataaaacttcaaaagataaagcgtaccgatatccagcaggatgttagaggccaggtcgccaataccgtaagagagtttctctttaaagggcaggcgtaaagttgctggatcttccgttgtgatgtgactcatgcttgttctccctttgcccatgagtttccccacgggcggatgtgattagatgctttttaagctcgcgaacagtgccgcccattcgctatcggcgcgataaaagaccggcggcttgccgatgggcgcattaacggtaacttccccgccccggaacgcttcacccgtccaggcgtggacccagttatcctccggcagatagagcgtccagtcgctacggccttcttcatgcaccggagcgaccagaatgtcgcgacctaacaggtactgatatttcagggtgtaagtgtgcgcatcgtcttcgtaatgcaggaacagcgggcgcataaccggcaggccggacttcgcattcagcgcgacggcctctttcaggtaaggtttcagggtggtgaagacggtggtcatacgggcgaaatgggcgatggtttctgcgtcgccgtcaaactgccagttgtcgccaggacggttaccttcgtgggtgcgcatcatcggcgtgaaggcgctgaaatcgcaccagcgcagcagcagctctttgctgcgcttcatctcaaacagggtggtgtaaccgccaatgtcgctgtggtgcaggccatgtccggtcattgccaggctcagcgccgccgggacaacgctcgccaggccatcgtcgagactccagtcgacgttctggtcgcccgcccacatcatggtggagtatttctggctaccggtagaaccggcgcgcataaagaaaaggatctcgccgagcttgcccgtttcttcaagggcttcgtagttacacttcgcccacagcgcaggccaggcgttatgcataatttcggcactgacgccgttatgcaagtacgtgtcggtgggcagatactcgccgaagtcagccatccagccgccgcagccgagttcaatcatgttctttttgatcacttccttgaaccaggcgtaggcttctggattagtgagatcgacaacgccgccgtaaaactcgccaaactccaccagatagtcaccgccagaggcatcttttgccagatagccgtgttgtgccgcttcttcgcagagatctttatcgctggcaacatacgggttgatataggccaggaactgcacgccctcctgattccactgcttaatgcgactatccagttgcgggtagttttcgctgttccacttccagttccacatcacgcgtttgccaaaagaggtcatacgaataccggaccagtcctgcgcccagatgccgttgaccttcacgcccgcgttacgcatggtgtccagtttcttctggcacacttccgtcccgccctgaatgccgagcgttactccgtcataaatccagtcgggcagttctggctggcgtcccagcagggcggttaatttttccagcagggaaatgtatgtgtcagcacattcaaaacgcagcgttgctttgtcttcccacagcgccagttcatggtattccggggcactaaagtcgaagttcatatagcaactgttatcaacatggcagtaatacttctgcgtgctgacaaacgtaggctgtgggaagaaagtccagtaatagtcgccgcccgcattttctttgcagtcggcctgccaggtgacataggtttgtttgttgcgaccaacgccttgttcactggtccatagcgggaacggtttgccacgcagatcgaagtaggaaaactgttcgccgcagccgtagatatggtcctctggttgagcggcaaggcgcagccagatacggttgtggttaaggttgtcgttttgtagttccagcaataaacgcccctgatcgtcggcagagatattcagcgtggcgctaatgtcagaaccacggctgaaatgaattaaccaaccatccggactctggctgacgatggcgtcggtaagcgcaattttctcctgtagtttatctttaatgctgaaattaccgcggaacatatcgatatccgctataccactgccaatccataaacaaggattatctttgctatgggttaaaataagacgttgttgaaaatgtagggtaaaactgtcgttattctgatgaaattgaaaatctaataactgtggacgtggcgtatccataactaatctccatagagttgagaacgagattgttgccttcctgttattacaggcttatgtaaaatgattctcataaaactgatatataaaaactttacagaagctgagctgtttttaacttaataaattgaagatacataatgttgcctttagcgagtgaaatgttcttcaatgattttgactgctaatcaatacaagttattttctctgtccgtaaatattaaaaaacaggcggtgcggttttccactttccagtaataataagtcgataccactattaaaggcgttaggcgggcaactcataggttcaactgccagtccctgacgctgtaatttttcaccgctataaacctgcacccagagttgatcggaacaaaggcttacgctaagcgcctgctgtggatgggtaatggtcatttcccacaaatcattagcggttttaaaggtgtggtcgatttttgtcgcggctatttttttcgcctgcgtgaaatttaaatccagctcatcaacgtggtgaagcgttgtcggattcgcgtgctcatcgacggcataaacctggtttgccggaagctggaacagatattcatcaacagatgttaagttgcaggttaaataaggatgaatacccacgccataaggcgctgcgacagtgccgatattctggcttgcgatctcaacggaaagacccgtgtgtgcgttgaggctataaacaacttgactagccagcataaacggatagccgtaactgggcggcagaaaagctgtcagggtaacgctggtggcggttaattcactaatttgccagtctcgccaggcaagcagcccgtgaatagcggctttactactatgttcattaatgggtaactgatattcctgcccctgatagcggtaacagccgttggcgatccggttcggccacggaataagcactttacccagatgcgccagcggcatctcttcgggtttgtgcgggatgactaaatgacaaccctgaaaggttaattcagccagaccagcaccgacggtcacaatggtcgcgtgataatcccccgcggcaagactaacggtctgtccactgcaatgcatattggtgatttgcatacaaggcaccttaattaagctcatacagcctcccgtgaggctgatgtcaaacccaaaaactgcaccggacggtcccctcgcccctttggggagagggttagggagaggggaaaacccgcaccctattttcagatcagttatttcgcattaatatccagcagacccgctgcaaccgctggagccatgccgggcgctaacgggatacgcgggatcaccaggcaatgcagcaggtgataaatatcctgtttgccgtcccagactttggtggtgaccttattgtccgcatccagctcctgccaccaggaaccattttcatagtccatcaggtacttaatgcagtactcccaccatgtttgataccaggtttcatactggcgatcgccagtgacggtgtagagcgcgtaggccgtacccattgcttcgacgataggccaacgtacacgttcgcggaccaccggttttccttcccagtcaacggtataaacaatcccgtccgcgccatcgggtgcccaggcatcgcgcacggtggcgttaaacagacctttggcatcttctagcagccatgctggtggttgttcgcaacgggcttccagggcagcatggatgtgcagcattaaacggccccattcgatccagtggcctggtgtacctccgaacgcgcggaagcgatgcgccgggttatctttgttgtaatccggcagcggattccactgggtatcgaagtgttcgttaacgcgataatgattatttctggcgacgtcgtggataatcacggaagccacgcgaatcgcgcgatccagccattttttgtcgtgagtgacgtcataaacaatcaagaaagcttccaccgcgtgcatattggcattgccgccgcggtactcttcggttttgctgaaggcttcgtcccaggattccaggcacatctgctcttcttcgctccagaaatatttctcgataatttcaatggtgtaatcgagcagcttgcgcgcttccgggtgacccgttgtgacggcgctggcggcacccagcagagcaaagaagtgttgatagccctgtttggaggcatccaccacgccctcgtcattcacgcaggcataccagccgccatattttttatcacgcagtgcgccgttcatggctttgataccgtgatcaaccaagctgtaagcgccaggtcgacccatcgccgcagcaacggaataaacgtgcaacatacgagcggtgatccacagatgggtgcccatctcttctttgatttgccctttattgcctaaccagccaaaaccagtcggcactacggaatttttaccaaaatcaaagatgcggtcggtttcctgttccagccaacggttgtggcttagggtgttaaaccatttcattccttttatcctcatcttagcggcgtttagccatcatttcgtcgacgatatcgccaagttgttgtaatttcggtgcgcaaacgtcacgcagcatcagctcgttgtctggtaaaccgacgacgcttgcccagactgcacggcctgccaggaatccgcttgcgcccgccgtcattgccacgcgtacggcacgcgggaacagtttttcgtcgacaccggaagagaggatcacccatggcatattgatatggtcattcagacgttgactagcacagagaagctcttgttgcggacctttgccataaagcggcatttcaactttgtagaggtcagcgccactgtcgcccagctctttggcggcatcgatgatcgcttgttcgcgatcgaatttatcgccacgacgcggtgggcggacgactggctcaatgatgcttaccagaccgtgactgtggcacagttcgttgaactctttcaccatatccagacgttgctgcgcatcttcatcactacgccacagcaccagcagttttaaggctttgccaccgtcttgtttgatctgtagcggattgattttgcggtcaataaccacgctatcgaccggaataccgttgccaggaatgaactcatcggcggcgacaatcatggcgcaacttttggcaatcgcgttttgctcaaccacctggcggtagcagaattgttgatctaccagaatcgcgctggcataagggctgagggcctttgcagcgttaactttgaaatcagttaaaacgctatcggctaccggagcgggtgccccagccgcggcaaacatcatgcgcatggcttcgcgctgatcgaccgccagcatggcaaaaccgccgcttgcgcgcgtaatgtcgttgatggtgtacttattcattcatttattcctttatccagtcgttacatttttactttggcagtcatcccggcactgacacggacctgttccagaatggcggaccagtcctggcgaccgcgacccgctgcgcgcgcctggctataaacctcccgactggcggcccccagcggcattggcacatgcagctggttggcgacatcaagggcgatgccaagatccttatgggcaagatcgatcatgaaggcgggagaaagatctccgctgaggactttgtttggccaggaagtggtgaagtgacctttaccggcggcggtaccgctcatcactttgacggcaacatcgaagggaagattcagggcttcgcacaaaacggcggcttctgcgctaagcgcattgagcgcgatgctcatgtagttgttgatgagcttaacgcggatccccatgcccggaccgccagcgttgatcaactcactgcccatcgccatcaggatcggtgtggcacgttcaacttgttcagcggtgccgccagccagcagtaacagagtaccggtaatggcatttgcagaagtacggcctaccggaacatccatcatgctgaagcctttggcttgcatatcggcaatcaatttatcggtttgcagcggatggatggtggacatatcaatgaccagcgcatcggtagataagccttcgcaaacgccgttttcaccgaacaacacgttgcgcaccagatcgccattcggcaacatggtaatgataaattcggcatctttagcggcctgcgccgggttggcggcgggagtcgcacctttgtctaccagatgccgcacagcttcggcgttcacatcaaagacgcgaagttgatgcccttgctgcaataaattgctcgccattgggctacccatttgtcctaaaccgataaacgcgattgctgccataaccctctcctgaatacagttatgtcactttttgtcatttatgacatgctttgcttgtctgtttttgatcgtatttgtaatttatcgtcaaaaaattgacagccgtcactttttaaacaattggtgaaattaaaatgaacgcatcccaaaatgtttaaggaatgaccatgattcgtgttgcttgtgtaggtataaccgtgatggatcgcatctattacgtggaagggttaccgacggagagcggtaaatacgtggcgagaaattatacggaagttggtggcgggccagcggcgacggcagcggttgcggcggcaaggctgggggcgcaggtcgattttattggtcgcgtaggtgatgacgacacgggcaacagcctgctggcagagctggaatcctggggcgttaacacccgttacaccaaacggtataaccaggcgaaatctagccaatccgccatcatggtggataccaaaggcgagcggataatcattaactaccccagcccggatctgctgcctgacgcagagtggttggaggaaattgatttctctcagtgggatgttgtgctggcagatgtacgctggcacgacggcgctaaaaaagccttcaccctggcccgtcaggcgggtgtgatgaccgttctggacggggacattacgccgcaggatatcagtgagctggtggcattaagcgatcacgcggcctttagtgaaccgggtctggcgcgcttaacgggcgtgaaagagatggccagtgcgctaaaacaggcacaaacgctcacaaatggtcatgtctatgtgacccagggtagcgcaggctgcgactggctggaaaatggtgggcgtcagcatcaaccggccttcaaagttgatgtggtagataccacaggtgcgggtgatgtttttcacggcgctttggcggtggcgctggcaacaagtggggatttagcggagagtgtccgcttcgccagcggtgtagcggcgttaaaatgcacacgtcccggtggacgagccgggatccctgactgtgatcaaacccgatcttttttgagtctttttgtataaaatgccagggtgatggtttttcgaggaattttcatgagccttaccgaactaaccggtaacccgcggcacgaccaactcctcatgctgatcgccgagcgtgggtatatgaatattgatgagctggcaaatctgctggatgtctccacgcagacggtccgccgggatattcgtaaattaagcgagcaaggcctgattacgcgccatcacggtggcgcgggtcgggcttccagcgtcgttaatacggcgttcgagcagcgtgaggttagccaaaccgaggaaaaaaaagcgattgccgaagcggtggcagactatattcctgatggtagtacaatatttatcaccattggtacgactgttgagcatgttgcccgggcgttacttaaccataatcatttgcggataatcaccaacagcctgcgtgtggcgcatattctttaccacaacccgcgctttgaagtgatggtgcccggcggtacgttgcgctctcataatagcgggatcattggccctagtgcggcgtcctttgtggctgattttcgtgctgattatctggtaacaagcgttggggcgattgagagcgatggcgcgttgatggagtttgatgtaaacgaagctaacgtggtgaaaacgatgatggcgcacgcgagaaatattctgctggtcgccgatcacactaagtatcatgctagcgcggcggttgaaattggtaacgtggcacaggtcactgcgctctttaccgacgagctgccgcccgctgcgctaaaaagtcgcttacaagacagccaaattgaaatcattcttccccaggaagacgcgtaaatttttgtgaccgttaacctggcttcataccttgccacatagccaaacccatcctttcccgctacagttaatttcttgtggcgcgaaaggaggcaaaaatgctctatatctttgatttaggtaatgtgattgtcgatatcgactttaaccgtgtgctgggagcctggagcgatttaacgcgtattccgctggcaagccttaagaagagttttcatatgggggaggcgtttcatcagcatgagcgtggggaaattagcgacgaagcgttcgcagaggcgctgtgtcatgagatggctctaccgctaagctacgagcagttctctcacggctggcaggcggtgtttgttgcgctgcgcccggaagtgatcgccatcatgcataaactgcgtgagcaggggcatcgcgtggtggtgctttccaataccaaccgcctgcataccaccttctggccggaagaatacccggaaattcgtgatgctgctgaccatatctatctgagccaagatctggggatgcgcaaacctgaagcacgaatttaccagcatgttttgcaggcggaaggttttagtcccagcgatacggtctttttcgacgataacgccgataatatagaaggagccaatcagctgggcattaccagtattctggtgaaagataaaaccaccatcccggactatttcgcgaaggtgttatgctaaaaaccattcaggacaaagccaggcaccgtacccgtccactatgggcctggctaaaactactctggcaacgcattgatgaggacaacatgacaaccctggcaggtaaccttgcctatgtgagcttgctcagtttagtgccgctggttgccgttgtttttgcgcttttcgccgcttttcccatgttttccgacgtcagcattcagttacgtcactttatttttgccaactttctgcctgctactggcgatgttattcagcggtatatcgaacaatttgttgccaattccaacaagatgaccgccgttggggcgtgcgggctgatcgtcaccgcgttattgttgatgtactccatcgatagcgcgttgaataccatctggcgcagtaaacgagcgcgaccaaaaatttacagcttcgccgtgtactggatgattttaacgctggggccgctgctggcaggggccagtctggcgatcagttcctatttgctctccctgcgctgggcgagcgatctcaatactgtcatcgacaacgtgctgcgtatttttccgttgctgttgagctggatctccttctggttgctgtacagcattgttcctaccatccgcgtacctaaccgcgacgcgattgtcggcgcgtttgtcgccgcactcctgttcgaagcaggaaagaaaggtttcgcgctttatatcaccatgttcccgagttatcagctcatttatggtgtgctggcggtgatccccattctctttgtttgggtctactggacatggtgtatcgtcttgcttggcgcggaaattactgtcactctcggggaataccgcaaactaaaacaagcagctgaacaagaagaagacgacgaaccatgattgcattaattcaacgcgtaacccgtgccagcgtcaccgtggagggagaagtgacgggcgaaattggcgcgggacttttggtgttattgggtgtcgaaaaggatgacgacgaacagaaagcaaaccgtctgtgcgagcgtgtgctcggctaccgcatctttagcgatgccgaaggcaagatgaatctcaacgtgcaacaggcgggcggcagtgtgctggtggtttcccagtttaccctcgccgcagataccgaacgggggatgcgcccaagtttctccaaaggtgcaagtccggatcgcgcagaggcgttatatgactatttcgtcgaacgctgccgtcagcaagagatgaacacgcaaacaggacgcttcgctgcggatatgcaggtaagcctggtcaatgatggccccgtgacattctggttgcaggtatgagccagcttccagggttgagtcgggaaacaagagagagtatcgctatgtatcaccttcgggttccacaaacagaagaagaattagagcgttactatcagtttcgctgggaaatgttgcgtaagcccctgcatcaaccaaaaggtagcgaacgcgacgcgtgggatgcgatggcgcatcaccagatggtcgtcgacgagcagggtaatctggtggcggtaggccgactgtatattaatgccgacaatgaagcgtccattcgctttatggccgttcatcccgacgtgcaggacaaagggttaggcacgctgatggcgatgaccctggagagcgtggcgcgtcaggaaggcgttaagcgcgtgacctgtagcgcccgtgaagacgcggtggagtttttcgccaagctggggtttgttaatcagggagaaatcaccacgccaaccaccacgccgattcgccattttttgatgattaagcccgtcgccactctggatgacattctgcatcgcggcgactggtgcgcgcagctgcaacaggcgtggtacgaacatatcccgcttagtgaaaaaatgggcgtgcgcattcagcaatataccgggcaaaaatttatcactaccatgccagaaaccggcaatcagaatccgcaccatacgctgtttgccgggagtttattcagtctggcgacgctcactggttggggacttatctggctgatgctgcgtgaacgccacctcggcggaacgattattcttgcggatgcgcatatccgctacagcaagccgattagcggtaaacctcatgcggtagccgacctcggtgccttaagcggcgatctcgaccgtctggcgcgcggacgaaaagcacgggtgcagatgcaggtcgaaatctttggcgacgagacgccgggtgcagtgtttgaaggcacgtatatcgttctgcccgcgaagccatttggcccgtatgaagagggcgggaacgaagaagagtaactgatggagaggggcggtgctgcctctctcattcaggtcatttatattagtccttggctatttcggttatattaaataagaactctataaatttttattcttcgttggctccatacgtgtcttgctacatcactgttcaggagcatttaaatattatttgtagaactgagtggcaattatcgcagataatgcttaattcatcatcttagttcatgtttgagcgatttttgatagtcaaaaccccctctggtgccatacttttctcataaatatttttaaaatctatagctaacaaatattatgcaaagataatggactagcatcattgtcagtatcattcatttactgctctgtatgttatgaataattatgttgtatgtttgctcttaaaccgtgggaaggaggctataatggttgccaatattaatctcattaaacaagaaagttattctgttgttaatttagaaaaacaactttcccgaactgttaccaacaaaattataacgatgagcaagtaaagaccggttggtggcagtactgaccggtctgtgatgaaagattaatttcaccttaaatcctggtgctgttaggatgctgacgtttttcggctacaccattcagattatgcaaataaatatctctgaatataatatattcatagcacccataattcatcctgggcgataactaaaccatttttgagtaataaatgaaacaactgcaacactcttattatttctggaaaacgcctcgcaaaaacaaaacaacatgcaaaaatccgctttttttaaatgattttccggcgtaattttcgcacatacattaatgagtaatatatgtaaggtattggtaatggcgatgaatacggtttttcttcatttaagtgaagaggcaattaaacggctgaacaagcttcggggctggcgtaaggttagtcgatctgcaattttacgcgaagcggtagagcaatatctggaacgtcagcaattcccggtgcgtaaagcaaagggaggcaggcaaaagggggaggtagttggtgttgatgatcagtgtaaggagcataaggaatgacaaaaatttttcattcttgaatataaaaaacagatgcccttattctggtattaatacaaggctgttttacttgaacttataataactgcaactgttacatcatatctggaaaacgcctcgcaaaaataaaaaatgatgcgtaaatgagctttctttaaagattcggcaagggtacttttctctccatagattcaaaaatgatattggcgagatatttatgaactctctggcaggtatagatatgggcagaattttactcgatttaagcaatgaggtgattaagcaacttgatgatctcgaggtgcagcgtaatcttcctcgtgcggacctattaagggaagcggtagatcaatacctgataaatcaaagccaaacagcaagaaccagtgttcctggcatctggcaagggtgtgaggaagatggtgtcgaatatcagcgtaagctgcgcgaggaatggtaatgggaaaaaatgatgtcaatcagattgctgacaacgtgcgcgttgttcatgccggatgcggcgtgaacgccttatccggcctacaaagtcgtataaattcaatgtattgcagtttattggtaggcctgataagcgcagcgcatcaggcaatcttacgcttgtcatcagtctcatgcccataaccttattgatgtggtggtgggtaaattgaggccaaaccggcactggcggcatagcttgaggtggtaacgcggaatacgagagatggtgtcgtcacaccctatgagctgtaatccgggcgacctgcgccacccggaaaacgtcagagattactctccttcacccggaaacaggaacgggttgatggaactgcgggcatagccttcttgctccattcgtgcgtccagtaccagagaggcgaggtcatctgctacggcttcgatttttggatctttttcctgatagagaattttcaggtaagtgtcgcagtcatcgcagctttcggctttaatcgcggcctgttcgtcatccaggctccagtaatgcagtttgccgctctgctcgcagttgctgcattttacgcgcactacgtgccattcagtttcacacaggttgcagtgcaggtaacgtagcccctgagtggtgccaatttgcaccatgctggacaccggcatagaaccacaaaccgggcaatattgacgttgctcgccgtattcagcgcgggctttgccggggatcagattggccatctgcgcccagtagaggctcagtgcagcccagataaacggcgctttatcgctgctgacggagctgaaatcagaggcaaacagcgcgctggccatatcttccagctcctgagtgcttgccttctccagattctcaatcactgccagcgccgggccgctcatttcaggtttcagctcagcaatcagcgccatcagcagcttttgccagtgcttatcacgcggcagaacgtgaatatccagcgggggcttgccttgtgcgctggcttctttaatgcgcgcagtcagatccatctccagcggatggtcgtacagcaccacttcctgggcgtgggcgataagcgcagcaaagcgcaggtaatcacccagaggattattttctgccagctcgcgcagacgctcggcgcggcggttgtataaattcttgagccgagggaacaataacggcggaatcatatccgccgtacgtttctcgctactacccagctcatcttgcgggattatgcgaatactcattcagctttcttttccgttgtcttgcggacctcacggtaccagcgcgggtgatgtttcttcgcccaggcgctggtaacccatccttccaccatggcggtaatcgtgcctttcacccaaagggcggcgtagatatgcaccatgataaccacaattaacgccactgcggcaaaactatgcagcattaacgcgaatcggatcaccgggatactgaaagcaggcgcaaaataaggacgccagataatcacgccgctcaccagcagcagaaccaggaaaataatcgccgcccagaaaacgcatttctgaccgaagttataacgcccggtgtcacctacttcctcgttgacgacgatcttacgaatattcttcgcccaaaagatatcatcccgattgattaggttgtgatgccagtaacggaaaaacatgatgatgaagctggcaaacataaccacgccgacaaacgggtgcagaattcgcgccagctgcggtgtgcccatgatttgcatcaaccagttgaaggacgggaacaaaaagcccagcccgctcaccgccgccaggatgaagcagaaggcggtgatccagtggttgatacgttccggcgcggtgtagcgcacgatggtgtcacgtcgtttcatttgcgctcctcgtctttctcttcgtgcagattattctcttcctcatccgcacggttcggaccgacacccacgtagtggaagatactggccgcaaaggtagccgcaaagccaacagccgcgagcggtttccagatgcctttccagaatttcacggtttcgctgatttccgggttctccggcaagccatgatacagatttggcttgtcagcatggtgcagcacgtacatgacgtgtgtaccaccgacgcctgccggatcgtacagacccgcattgtcgtaaccgcgggttttcagctcagcaacgcgctcgctcgccagcgttttcatgctctctttcgtaccgaagtgaatcgcgcccgttgggcaggtcttcacgcaggctggttcttgcccaaccaccacgcggtcaacgcacagcgtacatttgtagacgcggttgtcttccgggttgaggcgcggaatgtcgaacggacagcccgcaatgcaataaccgcagccaatgcactgctcggactggaagtcgacgataccgttggcatactgaataattgcaccttccgccgggcacgctttcaggcagcctggatcggaacagtgcatacagccgtctttgcggatcagccattccagtttgtcgttctgctccacttcgctgaagcgcattaccgtccagcttttggcgcttaaatcattggggttgtcgtacaccccaatgttattgccgacggtatcgcgaatgtcgttccactcactacacgccacctgacaggctttacagccgatacaggtggtaacgtcgatgagtttcgccacttcttcctggaagtcccgcgcctgaggcgcgggggtcagaccgttagtcgcggaacgacgaatgatatcttgagattgataagccatatgtcgtctccgttacaccttttccacattcacaaggaaggacttaaactccggcgtctgcgtgttcgcatcaccaacgaatggcgttaaagtattggcaataaagccttttttagctacgccttcatagccccagtgaatcggaataccgatggtatcgatatctttgccgttcgctttcagcgtgcgaatacgtttggtcaccaccgctttggctttgatatagccacggttggaggagactttcacggtatcgccctgggcaatgccaagtttattcgccaggctctccccgatttccacaaactgctctggctgcaaaatcgcgttcaacagcgcgtgtttggtccagtagtggaagtgctcggtcagacgataggtggttccgacatacgggaacttatcggctttacccaatgcttcggcgtcgtctttaaagatacgtgcagccgggttgctgataacgtttggatgcagcgggttagttcccagcggcgtttcaaacggctcgtagtgttccgggaacggaccttccgccatcttatcgagggcaaacagacgccccatgccttcctgctgcatgataaacggcccgacgccgctacccggaggcgctgcgctgtagtccggaatatcccagccggtccacttagtgccgtcccatttcagcaactgacgcttcggatcccacgggttaccctgcggatctgcggaggcgcggttatacagaatgcggcggttaagcggccatgcccatgcccagcccagcgtgttaccgaggccagacggatcggcgttatcacggcgtgccatctggttgccttccggcgtccagctaccggcgaaaatccagcagccacaggaggttgtaccgtcatcgcgcaattgggcgaagctactaagttgttggcctttcttgacgataaccgcaccggttgccggatcggtaatatcggccagcgccttaccgttgctctccatcgccacttcttcactagatggctcatgcggaatggcgtagttccatgtcatgttcagcacctggtccgggttcgcgccaccctgttcggcatacatcttgcgcaagcgcaggaagataccggagaggatctcgccgtcagtcagcgcaatccccggggcgtccgcacctttccagtgccactgtaaccagcgaccactgttaacgatagaaccgttctcttccgcgaagcaggtgcttggcagacggaacacttcggtctggatcttgctgctgtcaacttcgttcagctcaccgtggttctgccagaagttagaggtttcagtgttcagtgggtcgatggtgacgaggaacttcagtttgctcagacaaccgatcactttgtttttgttcgggaaactggcaacagggttaaagccctggcagatatagccattgaccttgccctctttcatcatctcgaagtattgcaggacgtcgtagcctttatcccacttcggcaaccagtcaaagccccagctattttccgccgtcgctttatcaccaaagaaggccttcatcatagagacgaagaatttcgggtagttgccccagtagtttacctggccttccagcagcggttttggcgtgttggcggtaaggtaggtttgcagatcggtctgcttctcgcttggcagcgtcatgtaacctggcaggctctggctcagcagccccaggtccgtcagcccctgaatattggagtgaccgcgcagggcgttaacgccgccgcctgccatccccatattgccgagcagcagctggatcatcgccatcgtacgaatgttttgcgcaccaacggagtgttgcgtccagccgagggcatacaggaagctggcagttttatcgtgagcactggtttctgcgatgtattcgcagactttcaggaacgcgtcttttggcgtaccacagatgttttcaaccacatctggcgtgtagcgggaaacgtgctgtttcagcaagttccacacgcagcgcggatgttgcagcgtggtatcgcgtttggcgaagccgttttcgtccagttcataagtccaggaggatttatcgtacttgcgtttttccgcgtcgtagccggtgaacaggccatcttcaaagccgtaatcctcacgcacgatcaggctggcgttggtataggcttcggtgtattcgcggttgaatttttcattgttcagcaggtacagcaatacgccactcaggaaagcaatgtcagtaccggaacgaataggggcatagtagtcagctaccgccgccgtacgcgtaaagcgaggatcgatcacaatcagcttcgcgccgttgtgaattttggcttccatcgcccagcggaacccgaccgggtgagcttcagcggcgttaccgcccatcaccacgacgaggttggcgttcttgatgtcgacccagtggttggtcatcgcaccgcgaccaaatgttggagcaagacttgctaccgttggtccgtgtcagacacgcgcctggttgtcgaccgcgagcatacccagcgcgcgggagaatttttgcgttaaatagccggtttcgttactgctcgcggaagcacacagcatcccggtggagagccagcggttaacagtcacgccttcggcgttttgcgcaatgtagttagcatcgcggtcttctttcatcagtttggcgatgcgatcaaacgcctcttcccaactgatttgctgccatttatcagaacctggcgcacggtattccggaaacttcagacggctttcggagtggatgaaatccaccaggccagcgcctttcggacaaagtgcaccgcggttgaccgggtgatccggatcgccttcgatatggaagatagatgctttggcgttttttgctccgtcaccgaggctgtacatcaacagcccacagcctacggaacaataggtgcaggtattacgggtttcgcgggtgcgcagcagtttatactgccgggtttccgcgagtgctacgctgggtgcaaaacccagtgccgctgccgtggtgcctgccataccgccagcgcagatcttaaagaactgccttctgctgacctgcatggattgctccttgtttcgacattgtcacgtcccatttacattcgcttgctgcgtgtgcagggagtgggagttatttttctttgcggaaggggccgcaaaggtccagaattggctcaatttccctccatccaggaagggtttgtaacagaataccataatgttggtgtgtgtgttcttatctggttaagagaaagtgaaaaaaacacagcgaaaagaaatcgaaaatgtgacaaatatcacaggtgttcgtcaaattgagttatggcggcgtgatgatttacaacacccacggttagatgaggtcgcggaagaagttcccgttgcgctggtctacaacggcattagccatgtggtgatgatggcgagccccaaagaccttgagtactttgcgctcggttttagcctttccgaggggattatcgaaagtccgcgcgatatcttcggcatggatgtcgttccttcctgtaatggtcttgaagtacaaattgagctttccagccgccgctttatggggttgaaggagcgccgccgggcgctggcgggacgtacgggctgtggcgtatgcggcgtggagcaacttaatgacatcggaaaaccggtgcagccgctaccgttcacccagacgtttgatctcaacaaactggatgatgcattacgtcatctcaacgattttcagccagtggggcaactgactggttgtactcacgccgctgcctggatgttgccatctggcgaactggtcggcgggcatgaagacgtgggtcgccatgtggcgctggacaaactgttaggccgccggagtcaagaaggggaaagctggcagcaaggtgcggtactggtttccagtcgtgccagttatgaaatggtgcaaaagagcgcgatgtgcggcgtagagattttgtttgcggtgtctgccgcgaccacgcttgctgtagaagtggctgagcgctgtaatctgacactggtaggtttttgtaaaccgggtcgggcaacggtttatacccatccgcagcgtttgagcaattaattaaaataagtcctgcgaaatatattaaattgcaggacttattcatttcgtgaattttattattttatttataaacaaaatgcgtgtagtggcgttttcttttttcatttattatgttcactctcttatctatatatttataaggcaattaaatgaaaaggaatttattatcttccgctattatagtcgccatcatgtccctcggtctgacgggttgtgatgataaaaaagccgaaacagaaacgctcccgcctgccaatagtcaacctgccgcaccagctcctgaagcgaaacctactgaagctcccgttgcaaaagcagaagctaaacctgaaacacctgcgcaaccggtggtcgatgaacaagcggttttcgacgaaaaaatggatgtctatatcaagtgctacaacaagttacagatcccggtacagcgcagtctggcgcgttatgctgactggctgaaagattttaaacaggggcctaccggtgaagagcgtactgtttatggcatctacggcattagtgaatccaacctcgctgagtgtgaaaaaggcgtaaaaagtgctgtggcgttaacgcctgcgctgcaaccaattgatggcgtggcggtgagttatatcgatgctgccgtggcgttgggtaataccattaacgaaatggataaatattacacccaggaaaattataaagacgatgcgtttgcgaaagggaaaacgctgcaccagacattcttaaaaaatctggaagcctttgaacctgtagccgaatcttatcatgcggcgattcaggaaattaatgataagcgtcagcttgcggaactgaaaaatattgaagaaagagaagggaaaacattccactactactctctggcagtcatgattagtgcgaaacaaattaataacctgataagccaagataagtttgatgcagaagcggcaatgaagaaagtgtctgaactggaaacgctagtggcgcaggccaaagaagcggataaaggcggcatgaatttcagctttattaatagcgcaggccagtatcaactcgaggctaaaaaatacgttcgccgcatcagagataaagtcccgtactctgactgggataaagagcaacttcaggacgcaaacagtagctggatggtcgaagactctttcccgagagcattacgcgagtacaacgaaatggttgatgactataatagcctgcgttaaacgtttttgatgataaatgcagtgtcggatgcggcgcatccgacacagttcaccccttgtgaagtaactccataaatgcctcatatcctgttaacccggcaataatctccgccggatgctgacacaatatgcttgccagatagctaaatatttttagctcatgacgcgcatcggcggcggcgcaggcgatcaagacatggttaatgacttcgttattcacctcaactggttgggcgagggtaataaaaaatccacgaaaacgtcgctcctgttcgctccagcaatgtgggatggcgaggcgattaacaatcaggttttcaccttcgccttcgcgggcgatgatgcgttgtgcttcatcggcggtaatatggtgttgtgcgactaattgcgcacaaatttgccgggtaatatgttgccagctttcaccgcgtacattgctataatgaaaacttccgggggcagagaaaaaacgctccggctgttggcgaataaatgccgtcgccagaaaatgttttatttgttcgataccggcagccgtaatgatattttttacggtgatgtaattatttaccgcgtcatccagtaaataatggctgttgttaatgatcaataacggctcaatctcttcgcgaatggcaacaagttcgcttaagctacgggcaataattacccgacaatttaaaacatcgcgctcaatggcgagctgattaatagtggcaatcgcgttctggtcgctgagcaaaatgatcggctggcgttcgttttgatgccgctccagcgcacaggcaaaatacaaaccgatcagatcgctgtcgaaaaggggaatatcgagctgttcacgcagtagcgtaataaagtgcagactcatatcaaaggccgcaggccaggcggctttcaggttattcatgctgctctggcggtgctcagcaatccacactggtgcggcaaggcaacgtaataaatgcccggtaatattctcaaccagctgcgcatcaataatattcaaactcgcgatgcccggcaccctttgcagcaacccctgcacattatcggcactaattacctgcgcttgctgatgctgtttctctatcaaacccgtcagggttcttacagcgttatcaccaagaaacagaccgctatgttcaacgatttgttttatctcgtcaccgggatattgcggccactcatcggtcagttgattacgcagggcgtaaatcgccagaatcaggctggagagataatcaccctgcatgagcggccagcggtgttggttgtcgcaggccgtggataaatgctgaaggttgtctcgtgttatgcccgccagcggaattaaaaacggatctttgcgcagcaagttcgccagcaagataacgcgtttctcttctgtctcatcaatgaaatggcccaaaccagggcggctggccaggcaacaagtgcgttcataacgctgttttaaccggggcagacgctctgctacccacgtttctggcaaattaagcgcgctggcgagttgcgcacggggagtgaaagtattcagtaataacagcgccagcagccgatcgtcgttatcgtgcttttgcagcaactgaaaaaagctgcggcgctcgaagatttccagctgatagcccgcactgccactggcgaaaatgcgggctttgccgttaagggtgaagttgagatagtcaatatcacgcaggatggtcctgccactaacgccagtctgttgcgccagctcgccaggcgtgcgcggctgttgctccagcagatcgacaatctttaactggcgttcgtttagcattaatccacctgacggaactggctaaacgcgttgactttctccgcagttaaggtcgtcagaaaaccccgtatcagcgtgagcagagcttcgtaatcggctttactaatcataccgctgttggcgtgcagataacgagttggcagacacagcgcgacaaccggacgcccgccgcccatcacgttgtagcgcccgccatccgtcgcaccggttttcatggtggaaaattgcagcggtaaatcgttatgtgcggcacagctttttaacgctgctaccagtttctggttggggaagtagcgcttgtcaaacagcatcagccccggcccctggcccagtttcagcgggtatttaatgttatcaatgcccggaacatcgcccgctacggcggtatccaacacgatcacgacgtccggtttaatgtgttccgcgctggtttgcgccccgcgtagcccaacttcttcttccacactgccaacgccatacagcgtaatttcgggattattcaccgtctgcaatagttcagccatcattgcgcagccgatgcggttatccaacgccttgccgaccactttatcttcgccccagcaggcaaaattggcttccgggctaataaaattaccaatttccacgccgcgcttttccacctcttcgcgactgttcgcgccaatatcaatgaacatctcatcaaaactcagcggttgttgcttttgcttttccgttaacgcatgaggcgcgacggaaccaatcacaccagggattttcactcccttgtgtgtgcgtatggttacccggtggttgagcatgctctgattccaccagccgccaatggtggtaaaacgcagaaaaccgctctcgtcgatgtgggtgaccataaagccgacttcatccatatgtccgacaacggcaacttttggacctttattccccttacgggcaacaaagctgcccagaccatcgaaggtgatttcattcacgcaaggttccagcgtgtttatcagaatgtcgcgaacttcctgttcatcgccgctgacggcgctggcttcgcacaactgttgcagtaactcaatgttcatggacaagctcctgttgcgcggctttcgctttgcggcgtaaccacaatcctttcaggacgataatgaaactaatgttcagcgcgaggccaatcgccagcaccagataaaagctacccaccgggctcatcaggccgatcagcgggtcaaagatacccaaaccaggtgccagacgtttgattccgaaagcgatcaccagcacgccggtaatgccgcccgccagcgtattggcggtaatcatcggcaacggagctgccagagcgtaaggaatagccggttcggttgcgactgtggcaccgaccacaatggcactactggcagcctctttttcctgtcgggtaaacagtttgggcgcaatgaacgtcgcaagacccgccgcgacgggcggcatcagcgcgacaacgccgacgatggcgtaccagtcataaatgtgtttttccagcagactgaagcagaagaaccaggcggttttattgatggggccgcccatatcgaacgccagcatcgcaccgaccagaaacgctgccgcaaacttcatacttggaggaatggtattcaggaagtggagcagcccgcccatgaggtcggacatcaccggcccgataacgtagtaagtgagcacgccgaaaaccagcagagtaacgaacgggatcagcatactaccgagcagcggttgtaatgctttgccaaggcgcactttgcggaaccagaagacgaaatagccaatcgccagccccagcaccaccgcgccgaggaatcccgcaccgctctgggtgccgagcagcgctttgtcgttcgccagatagcaaaccagaaacgccggagcgaaagccggtttatcggcaatgctgctggcaatataagcgcccatgatggggatcataaaggtgaagccaaggtaaccgatggattcaactacccaggtaaagctcggcgcgcctttgctcatatcggtatacggcaaaccgaactgcaccagcatgttggcaagcgccaccaggataccaccgccgatgacaaacggcagcgccgcagagacgcccgccatcaggtggctcatcacgctaccgctttgcacttcctgtttgccaagcttcacgccgctatctgcggcaaaaagctggctgtttgtcggtaattcgctgaaaatctggtcgatatttttcaacgcctgggagatggcaatctcataaactttcttcccggcaaaccgcgcgcgatcatcaccgctcaggccacgcccggtagcgagaatgacgtaatcggcagcggcaatctcttcgctggataagcggttttcaacgccactggacccttgagtttccacttttatggtatgaccgagagaacgggctttctgttccagggcttccgccaccatgtaggtgtgagcgatcccggcggggcagttggtgatcgcgacaatacgtaaggaactctccatcgccacttccttaactgctgagggtttgatttaacaaggcaagcacctggtcggtatcgccctgttgcagttgatgaataaattccttgtgaataattttgcgacacagtgtgccgatgattttgacctgatcctcttcgccgctttgcggcacgccgaggcagatccagcaattgacgtcttcgccatcgctggctttccagtcaatagcctgcgctttgcgggcgaataatacgaacggttgtttaacgcaggcgcttttaccgtgcggcacggcgacaccggaaccaaatccagtagagtgcattttttcgcgcagcagcagggtttgcaggaactggtgactgtcggtgataaaaccgttttgtaacgctattgtcgccaactgcttcagaacggaataagcgccattgccctgaatattcaggtcaatacagcttgcagtaagagctgccattaatcggactccataaaatatattttaatcaattgtaatggtggagcgattaagtgatgagaggcgatatgtcggtaaacaatgacaatttgagacagagtgaaaggtcagatttgcggagtaatgcacataatggttatttaaataaaccacatgaatcattaatgggttattcattatttttgtgatttactcacaatgtatcagggaaatataacttaccgggagatgtaatatgtttaatttttcaaatcgaaatttaaaatattgtgccggaggcatctctggcacattgggcaattacggcaggtaaaacacttcttgcagctcgctactcaccgggctgttatccgggttagcgggcataacatcggtcatatatttccaccaacgttggcagacatcagtgctggcaaccgcattccagcgttcttcagattcaatctctaccatggcaaacagcagattacgcgctttgtcgagatagatggcgtagttatgcgcaccgtgagatttcagcactgcttccagttctggccagatgggattatgccgacgctgatactcttcgtgggcgtcggggtttacctgcatgacaaaggctttgcggatcatgtttgctccttacagcgccagcgcactggcgagtggcgtaacgccgaaacgcttgccgagcgctatcaactcttcacggctgatggtctgtttcatgccgcccatgctataaaccttcactaatacttgtgcacttttttctgcggtgtcgattaaaccgaaggtttcatccagcgtcggtccgctgccgaagacgccgtggaagggccacaacaccaggctatgtttttgcatctcttgtgcggtcgcctggccgatttcgtccgtgccgggcaccatccacggcaaaatgccaacgccatccgggaataccaccagacactcggtgctgccttcccacagttggcgagtgaagaccgcggtgtcgttttcaagtacataggtgagggcgatcaggttggtggcgtggcagtgcatgatcacccgatctttgccgttggtggctttaatgcgctcgcagtgggaaaggaagtgagccggaagttcggaagtggggacggcttcgttggttaacccccaaagaatgtggtagcccgcgccgtcgctgtcgacttttacgatgcctaagttagccgcaggatcaagctggacgttacggaagaatttgccgctgccggtgacaataaacggtgtatttgccagtaaaggcatgggctggctgagcgggatatagcgcggttgttggtggaaattgtcgtgatatggtgcgatatcggcgtcatccaggcgtagcgtcaggttgccgccgttgcgctcatcccagcctttcagccaggcgtcggtggtggctttgatcattccctggacaaaccaggactgagtaatgttttgcatgttctgtgttcctgtaaattcggtgttgtcggatgcacgacccgtaggccggataaggcgctcgcgccgcatccggcaatcaatgcctgatgcgacgctgtcgcgtcttatcaggcctacaactattgccgacctgtaggcctgataaggcacttgtgccgcatccggcaatcaatgcctgatgcgacgctgtcgcgtcttatcaggcctacaactgttgccgacctgtaggccggataaggcacttgtgccgcatccggcaatcaatgcctgatgcgacgctgtcgcgtcttatcaggcctacaactattgccgacctgtaggccggataaggcacttgtgccgcatccggcaatcaatgcctgatgcgacgctgtcgcgtcttatcaggcctacaactgttgccgacccgtaggccggataaggcgctcgcgccgcatccggcagtgtttacccgcggcgactcaaaatttctttctcataagcccgcacgctctccagccattcgctacctgctggcgtatcgtgacgttggcaatacatttcccagaccgcctgccacggcaagcttttctgctcttccagcagtgccagacgcgcagtgtaatcgcccgccgcttccagcttgcgcagctcagcggtaggttccagcaacgcacgcagcagggcttttttcatattgcgtgtaccaatgacccacgcggcaatgcggttgatagaggcatcgaagaagtcaaggccgatatgcacccggtcaaacagatcgtgacgcacaatctcactggcaattgcctgggtttcatcatccagcagcactacgtgatcgctgtcccagcgaaccggacggctgacgtgcagcagcaactgcggcacatacagcatggcggcggaaatcttgtcggaaatcacttcagtcgggtggaagtgcccggcgtccaggcacagcgcagtctggcggctggtggcataccccatgtaaaactcattggagccaaccgtgtagctctctgcgccaatgccaaacaatttgctctcaacggcgtcgatatggtgcgcagggtttagcttctcgctgatcacctcatccagtgctgccagcagacgctgacgcggggcgagacggtcaacggtgatatctttcataccatccgggatccagatgttcatcacgcttggtgtgccgagttgctcgccaaaataggcgctaacgcgacggctggctttgcagtgatcaatccagaactggcgaatgctgtcgtcggcatgggaaagcgtaaagccatcggcgcttagcggatggctaaagcaggaggggttaaaatccagaccgagctgattggctttcgcccattcaacccagtttttgaagtgctctggtttgatctggtcgcggctgactggcgtatcactttccagatagatggcatgtaaattaagccgtttcggccccggaatcagccgcatagcctgttccagatcggcacgtagctcactggcattacgcgctttgcccggataattgcctgtggcctgaatccccccggtcaggctaccttccgggttttcaaaaccggaaacatcatcgccctgccagcagtgcatactaacgggtaaacgatcaagttggcgcagcgcctcctcgacatcaatccccaccgccgcgaaacgctgtttcgctagctcccaggcctgttccagttgagtggtcatgcgcaaagctcctttgtctgtcgtgtagagtgaatctgcgccacatagtgggcaatttcactgtcaggattaggggtaaaggtggtcagattcgcggtggtgctgacgacctgacggaaatcatccacattgttgagttcatccagcgtcattaactggatgccgatattgccgagcgtgctggcttcaacaggcccggcgatcacccgaataccgcaggcatcggcgcatagctggttgagcagcgtgttctggcagcctccgccgacaatatgcagttggctgaaatcttcaccgcgcagctgcgccagctcatgcaacacatcggcatacagcagcgccagactgtcgaaaatgcagcgcgccagttcagcatcactttccgggatcggttgcgccgtttcccgacacgcagcctgaatttcgctgcacatcgtctcaggattaataaagcgatcgtcattgggattgataatgaagcggcaagccggaagtgcctgtgtcgcggagataagcgccggaagatcgttgatttgctgctcctgaagcactcgctgaagcagccataagcccataatatttttcagcacccgatagcgaccttccgccccgccttcattggtgatgttggctgccagtgccgtgtcattggtaaatggcgtctggctttcgaagcccatcaaactccaggtgccagaagagagataagcagcacgactgccgtttaacgggctggcgataaccgcgctggcggtatcatggctggcaacggcgaccactggaatctcattaccctgcgggcaaatccagtgacctatgacattacccggatgcgtcgggcgaccaaaccaggctttgttggccccgctccacgccagtaggctctcgtcccagtcgtcgctattgatattgaccagttgcgtggtcgtggcgttggtatattcccagttcatcttgccggtcaggcgataactgaagtaatccggcatcagcagagcgtgagcaatgtgtggaataagttcaggttgttgctccgtcagcgcacgcaactgataaagcgtattgaagggcagaaactggatgccgctacgttgataaatatcgcgtttgccgagttgttgttgtgcctgcgccattaggccattggtgcggctatcgcgataagcaacgggcaggcccacacgctgaccctgttggtcgagcagcacaaagtccacgccccaggtatcaatcccaatgctatcgatacgaatcccttcctcgcacaccttgtttaatccaaggcgaatggcactttcaaggctatccacatcccaggtgacatagccgttctgactatgcagcccattgttaaaacgatggatttcgcgcagcgtcaggctgcggcattcacgctcgtaacgcgccagcatcacgcgcccactggatgcgccgagatcgacggcgacacaattgcgaaaggtcataatgtgatcctgctgaatttcattacgaccagtctaaaaagcgcctgaattcgcgaccttctcgttactgacaggaaaatgggccattggcaaccagggaaagatgaacgtgatgatgttcacaatttgctgaattgtggtgatgtgatgctcaccgcatttcctgaaaattcacgctgtatcttgaaaaatcgacgttttttacgtggttttccgtcgaaaatttaaggtaagaacctgacctcgtgattactatttcgccgtgttgacgacatcaggaggccagtatgaccgtattacatagtgtggatttttttccgtctggtaacgcgtccgtggcgatagaaccccggctcccgcaggcggattttcctgaacatcatcatgattttcatgaaattgtgattgtcgaacatggcacgggtattcatgtgtttaatgggcagccctataccatcaccggtggcacggtctgtttcgtacgcgatcatgatcggcatctgtatgaacataccgataatctgtgtctgaccaatgtgctgtatcgcagcccggatcgatttcagtttctcgccgggctgaatcagttgctgccacaagagctggatgggcagtatccgtctcactggcgcgttaaccacagcgtattgcagcaggtgcgacagctggttgcacagatggaacagcaggaaggggaaaatgatttacccagcaccgccagtcgcgagatcttgtttatgcaattactgctcttgctgcgtaaaagcagtttgcaggagaacctggaaaacagcgcaagtcgtctcaacttgcttctggcctggctggaggaccattttgccgatgaggtgaattgggatgccgtggcggatcaattttctcttagtctgcgtacgctacatcggcagcttaagcagcaaacgggactgacgcctcagcgatacctgaaccgcctgcgactgatgaaagcccgacatctgctacgccacagcgaggccagcgttactgacatcgcctatcgctgtggattcagcgacagtaaccactttagcacgctttttcgccgagagtttaactggagtccgcgtgatattcgccagggacgggatggctttctgcaataacgcgaatcttctcaacgtatttgtacgccatattgcgaataatcaacttcgttctctggccgaggtagccacggtggcgcatcagttaaaacttctcaaagatgatttttttgccagcgaccagcaggcagtcgctgtggctgaccgttatccgcaagatgtctttgctgaacatacacatgatttttgtgagctggtgattgtctggcgcggtaatggcctgcatgtactcaacgatcgcccttatcgcattacccgtggcgatctcttttacattcatgctgacgataaacactcctacgcttccgttaacgatctggttttgcagaatattatttattgcccggagcgtctgaagctgaatcttgactggcagggggcgattccgggatttaacgccagcgcagggcaaccacactggcgcttaggtagcatggggatggcgcaggcgcggcaggttatcggtcagcttgagcatgaaagtagtcagcatgtgccgtttgctaacgaaatggctgagttgctgttcgggcagttggtgatgttgctgaatcgccatcgttacaccagtgatagcttgccgccaacatccagcgaaacgttgctggataagctgattacccggctggcggctagcctgaaaagtccctttgcgctggataaattttgtgatgaggcaagctgcagtgagcgcgttttgcgtcagcaatttcgccagcagactggaatgaccatcaatcaatatctgcgacaggtcagagtgtgtcatgcgcaatatcttctccagcatagccgcctgttaatcagtgatattagcaccgaatgtggctttgaagatagtaactattttagcgtggtgtttacccgggaaaccgggatgacgcccagccagtggcgtcatctcaatagccagaaagattaattcgccatgccgatgccgacgatgttagcggcgacaataatcaccacacaaccgaggctcaacaccgttaccggacggcgtcctgcattgttccactctttcagcaccagcccgacgataccgccgcacaatacatagaaactcatatgcagcatccaactgatgtagtcatactgcgccggaatgcgggcgtggccccaggcatagaaaaagaattgcagataccacatcaacccgcccagtgtgctgagtaacacattgtgaatgatcaggctttttgccaggctgaagtcggcttttaggctcaaatccttcacttttgccagacgaataaaacagaaaccgaggttaatgatcgcgccgccgcccatgatgacaacatagcttggcagagcgacatacagtggatcgacgccaagtgcggcagcggcttcatgcatcggttttgcggcgttcatcgcaaaggacatcccggcagagaaaatgccgcacatcaccgccagcaccagcccttttttcagattgaactcttcggctttaatgcccatcttgcgctctttcaactgcccggcgcgagttacaatccctacgccaatcagcgccaccagaacgccgagcaacgtcatgcgtccgccttcggtgctaatcaacacatcgaaattgccgttgataattggcgtcatcagcgtaccgacaatcaacgtaatgccaatggcgatgccaattcccatgctcatgccgagataacgcatggtcaggccgtagttgatattaccgatcccccacatagcgccgaacagaaaaacaggcagtcgcgtagagagactaaagctgctgtaatacgcccagaaattcggtagtaacagggcgctgatggcccacggcagaataatccagctaacaatcccaccgacactccacatggtttcccaactccatttttttacttttttgaacggagcgtaaaaacaggctgcactggccgcgccgatcaaatgccaaaatatccccatcgtaatcgcgttactcatcttcttatcctcatcatttttcgtcgcgtcacatctccgacgagatgagtgtaaaaatcgtgctgtcgattaacctttcgcctgttgccgccgttgtcgatttactggcaatcacggcattaagtgggtgatttgcttcacatctcgggcattttcctgcaaaaccatacccttacgaaaagtacggcattgataatcattttcaatatcatttaattaactataatgaaccaactgcttacgcggcattaacaatcggccgcccgacaatactggagatgaatatgagctataccctgccatccctgccgtatgcttacgatgccctggaaccgcacttcgataagcagaccatggaaatccaccacaccaaacaccatcagacctacgtaaacaacgccaacgcggcgctggaaagcctgccagaatttgccaacctgccggttgaagagctgatcaccaaactggaccagctgccagcagacaagaaaaccgtactgcgcaacaacgctggcggtcacgctaaccacagcctgttctggaaaggtctgaaaaaaggcaccaccctgcagggtgacctgaaagcggctatcgaacgtgacttcggctccgttgataacttcaaagcagaatttgaaaaagcggcagcttcccgctttggttccggctgggcatggctggtgctgaaaggcgataaactggcggtggtttctactgctaaccaggattctccgctgatgggtgaagctatttctggcgcttccggcttcccgattatgggcctggatgtgtgggaacatgcttactacctgaaattccagaaccgccgtccggactacattaaagagttctggaacgtggtgaactgggacgaagcagcggcacgttttgcggcgaaaaaataatcatttgccgcctgctgcaatgaggcgtataggccgcatatcagcttaaaaaatgaaccatcgccaacggcggtggtttttttgtgatcaatttcaaaataaaaacaatgatccgataaaaataaaacagcgtttcaattgatgtggttttgatcacttttattgattaaatgaatgtctatcttcgtttccatcaacactgatgctccattgaggaattacgcatcagcccttaaaaatatgccgacaggtgatggaaatgcagataaaacgcagcattgagaaaatcccgggggggatgatgctcgtcccgctattccttggcgcactgtgccacaccttcagcccgggggcggggaaatattttggaagtttcaccaacgggatgattaccggtacggtgcccattctggcggtgtggtttttttgcatgggggcgagtataaaattaagcgcgacgggaacggtactgcgtaaatccggtacgctggtggtaactaaaattgccgtcgcgtgggtggttgcggcaattgccagccgtattattccggaacatggtgttgaagttggattctttgccggacttagtacgctggcgctggtggcggcgatggatatgaccaatggcggactttacgcttccatcatgcagcagtacggcacaaaagaagaagctggggcatttgtgttgatgagcttggagtccgggccgctcatgacgatgattattctgggcactgccgggattgccagctttgaaccgcatgttttcgtcggcgcagtattaccgttcctggtgggctttgccctggggaaccttgaccctgaattgcgagaatttttcagcaaagcggtgcaaacgctgattccattctttgccttcgcgctgggcaataccattgatttgactgtgattgcccagactggtttgctggggatcctgttgggtgtggcagtaattatcgtgaccggtattccgttgattatcgccgataaattgattggcggtggcgatggcactgccggaattgccgcttccagttccgcaggggccgcggtagcgacacctgtgctgattgcagaaatggtgcctgcgtttaaaccgatggctccggcagcaactagcctggtagcgacggcggtcattgtgactagcattctggtgccaattcttacctctatctggagtcgtaaagtcaaagccagagcagcgaaaatcgaaattttaggtacggtgaaataaacctgcttccttaatccccacagccggatgaactaacgttcgtccggtttgctattgagttcctgcctggatacttaccgcgaaaacagcacgcctgacataaaataaatatggtctaatggggaaatttctcgtggagagggaacagatgcgatatccggttgatgtatacacaggcaagattcaggcttatcccgaaggcaaacccagcgcaattgctaaaatccaggttgatggtgagttgatgctgacggagctggggctggaaggtgacgagcaggcggagaaaaaggttcacggcgggccagacagagcgctgtgtcattatcctcgtgagcattatctctactgggcgcgggaatttccggaacaggcggagttgtttgttgcgcctgcgtttggtgaaaacctcagtaccgacggcctgacggaaagtaatgtttatatgggcgatattttccgctggggagaggcattaattcaggtcagccagccgcgcagcccttgctataaactcaattaccattttgatatcagcgatatagcgcagttgatgcaaaacacaggtaaggtggggtggttgtatagcgtgatagcgccagggaaagtgtctgcggacgcgccgctggagttggtttcccgtgtcagcgatgtgaccgtgcaggaggctgccgccatcgcatggcatatgccgtttgatgacgatcaatatcaccgtttactctccgctgccgggttaagcaaaagctggacgcggacgatgcaaaagcgccgactgagcggcaagatcgaagatttttcccgccggttgtggggaaaataacccccggagtgtaggcctgataagacgctatcagcgtcgcatcaggcatcctgctcaaatgccggatgcggcgtaaacgccttatcctgcctgcaaatgcgaagtttaactccgcttatacagcggcaaccaaatcaccagccgtaaaccgcccagcgggctgtcttctgccttcacccagccacgatgctgctgaatggcggtttcaacaatcgccagccccaaacctgtaccgccagattcacgatcgcgtgcttcatcggtacgatagaacggacggaaaatctgttcgcgatcttccgggctaacgccaggaccatcgtcgtccaccgtaatggtgataccgtctttatctaccgcaaagcccacttcaatcttcgtatgggaataacgcagagcattacgaacaatgttttccagcgcactttccagggcgttcggattgccgtacagcggccacggcccaggcgggaagttaactgtcaagctcttgcccatttgctcggcttcgaacgccgcgttatccagcacttcactccacaactggttggctttgatggtttcgctaaccagcgcgtttttttgctgattacgactcatcaccaacagatcgttgatcatgctgtccagacgttgcgcttcggtttcaatacgctccagttccttgctttcaccgctacgacggcgcagtaacgccgtacccagttgcagacgcgtcagcggggtgcgcagctcgtgagagatatcagaaagcagacgctgctgagaggtcatcatgcgctccagcgcggtgaccatctggttaaaactggcacctgcggcaaggaattcctgtggccccgcttccagttccgggtgctggcgtaagtttccctgggcaacttcatcggcagcgtttttcagcttacgcgccggttttgccagactccaggccaaccacaacagcagcggcgtactgaccaacatggtgacaatcagcagtaatagcgggcggtcaaacagtaagttaatgaaatcggattgagaactgctggccggacgaatcagataaagttggtaattatcttcgccatcacgcacggagaacggaccgaccagttccacgcggccatactttttcttctgcggatgatcggcgttatcggcctgaccaataaagttacgaatgatctgcatttcgctgcgttcagcgccgatcacgcggccttcggtggtcaccaataacaaacgctgtcctggcggtgcccacttatcaatcgcccggaacagacgccgccaccacattaaatcgttgggcggatcgttcgccagctccgcttcgacatgctgctcaatcatcagcccctgacgctgttcgctatccagaagctcggtcatctggcgactatcgagcttgggtaacatcaaaaccaacatcaacaccagcgccagcgtcagccagaagatggcgaagatgcgcgcggttaagctgcctatcatgaagcagaaaccatcagatattagctcaactagcagaaaccatcagatagccgcgaccacgcaaggttttaaaccacgggtgaccatctttacgatccggcagtttacgacgcaggttggaaatgtgcatatcaatagcgcggtcgaaaggcgtcaggcgtttgcccaacacttcctggcttaaatgttcacgggaaaccacctgacccagatgctgtgccagcaaatagagcagggtaaactcagtaccggttaactccagcgtttgcccgtcgaagctggcttcctgacggcctggattcagcactaaggcatcaacttccagtgtcggactaccgttgtcgttgttttgctgttgctcgctccagtggctacggcgcaggatcgcgcgaatacgtgccaccagctcacgatcattaaacggtttcgggagatagtcatctgcgcccagctcaaggccgagaacgcgatcaagttcactgccgcgcgccgtcaacataatgacaggcgtctggtgtgtctggcgaagtgcttttaatgtgtcgataccatttttcttcggcatcattacgtcaagcaaaagtaaatcaatgctgtcgtccagaagatcaagcgcctgttccccatcgtgggcaacaatcacgttgaagccttccatctcgagcagctcctttaatagggaagtcagctctcggtcatcatcaactaacaggattttattcattgtttaaatacctccgaggcagaaattacgtcatcagacgtcgctaatccatgactttacgttgttttacaccccctgacgcatgtttgcagcctgaatcgtaaactctctatcgttgaatcgcgacagaaagattttgggagcaaatgatgcgcatagttaccgctgccgtcatggccagtacgctggcagtcagtagtttaagccacgctgctgaagtcggtagtggcgataactggcatccgggtgaagaacttacgcagcgcagtacgcagagccatatgttcgacggcataagtttaaccgaacatcagcgtcagcagatgcgagatcttatgcaacaggcccggcacgaacagcctcctgttaatgttagcgaactggagacaatgcatcgccttgtcaccgcagaaaattttgatgaaaacgctgtgcgcgcacaggcagaaaaaatggcgaatgagcaaattgctcgtcaggttgagatggcaaaagtccgcaaccaaatgtatcgcctgttaacgccggagcagcaagcggttttaaacgagaaacatcaacaacgaatggagcagttgcgtgacgtgacgcaatggcaaaaaagtagtagcttgaagctattgagtagtagcaacagtcgttcccagtaataaaccctgttttccttgccatagacaccatccctgtcttcccccacatgctgtgggggttttttttatcctcaatttgcctgctgcttaatgcattgcagatgatttgcttccgttatactagcgtcagttgatagcgggagtatttatgaatcaatcttatggacggctggtcagtcgggcggcgattgctgcgacggcgatggctagcctgctattgctgattaaaatttttgcatggtggtataccgggagcgtgagtattctcgccgcgctggtggatagcctggtggatatcggcgcgagcttgacgaatttattggtggtgcgatattccctgcaacctgccgacgataatcacagctttggtcacggtaaagctgagtccctcgcggcgctggcgcaaagtatgtttatctccggtagcgcactattcctgtttttgacgggtattcaacatctgatatctccaacaccgatgacagatccaggcgtcggggttatcgtgacaattgtggcgctaatttgtacgattatccttgtcagctttcagcgttgggtggtgcggcggacgcaaagccaggcggtgcgggctgatatgctacattaccagtctgatgttatgatgaacggcgcaattctgctggcgctggggttgtcctggtacggctggcatcgcgccgatgctctgtttgcattgggaatcggcatctatattttatatagcgcgttacgcatgggatatgaggcggtacagagtttactggatcgcgcattgcctgatgaggaacggcaagaaattattgatatcgtgacttcctggccgggtgttagcggcgctcacgatcttcgcacgcggcagagtgggccgacccgctttattcagattcatttggaaatggaagactctctgcctttggttcaggcacatatggtggcggatcaggtagagcaggctattttacggcgttttccgggaagcgatgtaattatccatcaggacccctgttccgtcgtacccagggagggtaaacggtctatgcttagttaatcagtataaaagagagccagacccgcattttgtgtataaaataccgccatttggcctgacctgaatcaattcagcaggaagtgattgttatactatttgcacattcgttggatcacttcgatgtgcaagaagacttccggcaacagatttcattttgcattccaaagttcagaggtagtcatgattaagaaaatcggtgtgttgacaagcggcggtgatgcgccaggcatgaacgccgcaattcgcggggttgttcgttctgcgctgacagaaggtctggaagtaatgggtatttatgacggctatctgggtctgtatgaagaccgtatggtacagctagaccgttacagcgtgtctgacatgatcaaccgtggcggtacgttcctcggttctgcgcgtttcccggaattccgcgacgagaacatccgcgccgtggctatcgaaaacctgaaaaaacgtggtatcgacgcgctggtggttatcggcggtgacggttcctacatgggtgcaatgcgtctgaccgaaatgggcttcccgtgcatcggtctgccgggcactatcgacaacgacatcaaaggcactgactacactatcggtttcttcactgcgctgagcaccgttgtagaagcgatcgaccgtctgcgtgacacctcttcttctcaccagcgtatttccgtggtggaagtgatgggccgttattgtggagatctgacgttggctgcggccattgccggtggctgtgaattcgttgtggttccggaagttgaattcagccgtgaagacctggtaaacgaaatcaaagcgggtatcgcgaaaggtaaaaaacacgcgatcgtggcgattaccgaacatatgtgtgatgttgacgaactggcgcatttcatcgagaaagaaaccggtcgtgaaacccgcgcaactgtgctgggccacatccagcgcggtggttctccggtgccttacgaccgtattctggcttcccgtatgggcgcttacgctatcgatctgctgctggcaggttacggcggtcgttgtgtaggtatccagaacgaacagctggttcaccacgacatcatcgacgctatcgaaaacatgaagcgtccgttcaaaggtgactggctggactgcgcgaaaaaactgtattaatgatttcggaaaaaggcagattcctttaccctgaaaccgatgacagaagcaaaaatgcctgatgcgcttcgcttatcaggcctacatgaattctgcaatttattgaatttgcaaacttttgtaggccggataaggcgttcgcgccgcatccggcatggacaaagcgcactttgtcagcaatatgaggcggatttcttccgcctttttaatccctcaacatatacccgcaagttatagccaatctttttttattctttaatgtttggttaaccttctggcacgctttgctcatcacaacacaacataagagagtcgggcgatgaacaagtggggcgtagggttaacatttttgctggcggcaaccagcgttatggcaaaggatattcagcttcttaacgttagttatgatccaacgcgcgaattgtacgaacagtacaacaaggcattcagcgcccactggaaacagcaaactggtgataacgtggtgattcgtcagagtcacggtggcagtggtaaacaagcgacgagcgtaatcaacggtattgaagctgatgttgtcacgctggctctggcctatgacgtggacgcaattgcggaacgcgggcggattgataaagagtggatcaaacgtctgccggataactccgcaccgtacacttccaccattgttttcctggtacgtaagggaaatccgaagcagatccatgactggaacgatctgattaaaccgggtgttagcgtgatcacgcctaatccgaaaagctctggtggcgcgcgctggaactacctggcagcctggggctacgcgctgcatcacaacaacaacgatcaggcaaaagcacaggattttgttcgggcactgtataaaaacgtcgaagttctggattctggcgcgcgtggctccactaacacttttgtcgagcgcggaattggcgatgtactgattgcctgggaaaacgaagctctgctggcagcgaatgaactggggaaagataaattcgaaatcgtcacgccgagtgagtctatcctcgcagagccaaccgtgagcgtggtcgataaagtggtcgagaaaaaaggtactaaagaggtggcggaagcctacctgaaatatctctacagcccagaaggtcaggaaattgccgcgaaaaactactaccgtccgcgcgacgctgaggtggcgaaaaagtacgaaaatgcgtttccaaagctgaagttattcaccattgatgaagagttcggcggctggacgaaagcgcaaaaagagcattttgctaacggcggtacgttcgatcagatcagcaaacgctgatttccccaggataattatcaaacccggtggtttctcgcgaccgggttttttatttgtcacgattttgcgttacccttgcatctctttgaggtacagggaaaaaaagatgaaaaaagcgggtcttctttttttggtgatgatagttatcgccgttgtggctgccggtattggttactggaaattaaccggtgaagagagcgatacattacgtaagattgtccttgaggaatgtttgcccaatcagcagcaaaatcaaaatcctagcccatgtgcggaagtcaaacccaatgccggatacgtggttttaaaagatcttaatggcccactgcaatatctgttgatgccaacgtatcgtattaacggtactgaaagtcctttgttgaccgatcctagtacgccgaacttcttttggttggcttggcaggcgcgtgattttatgagcaaaaaatacggccagccggttcccgatcgcgcggtttctttggcgatcaactcccgcaccgggcgtacgcaaaaccattttcatattcatatctcttgtattcgtcctgatgtgcgcaaacagctggataacaatctggcgaacatcagcagccgctggttgccactgccaggtggtttgcgcgggcatgaatacctggcgcgtcgggtaacggaaagcgaactggtacaacgcagcccatttatgatgctggcagaagaagtacctgaggcgcgggaacatatgggacgctacgggctggcgatggtacggcagagtgataacagttttgtattgctggcgacacaacgaaatctactgacgcttaaccgtgctagtgccgaggaaattcaggatcatcagtgtgagattttgcgttaaggcgaagagttaaggaaagtaagtgccggatatgaaatccggcacctgtcagacttaagcctgtttagccgcttctgcagctttaacgattactgcgaaggcgtcagctttcagagaagcaccaccaaccagcgcgccgtcgatatccggctgagcaaacagttctgcagcgttagacgcgtttacagagccgccgtactgaatgatcacttgttcagcgatgttagcgtcaactttagcgatgtggtcacggatgaatttgtgaacagcctgtgcctgagccggagttgcagatttgccagtaccgattgcccatacaggttcgtaagcgataaccgcaccttcgaatgccgcagcaccctgagttttcagtaccgcgtcgatctgacgtgcgcaaacttcttcagttttgcccgcttcattttcagcttcggtttcaccgatgcacagaaccggagtcaggccctgctctttcagcaccgcgaattttttcgcgatcagttcgtcagattctttgtggtaagtacgacgttcagagtgaccgatgatgatgtactgtgcgccgatgtctttcagcatagcagcagaggtttcaccggtgaatgcgccggacaggttcaggtccacgttttgcgcacccagcatgatgtggctgccttcagcttcgcgcttcgccatatcgatatacatttccggtggtgcgattgcaaccgcacagccagcaacacctgccagctctttacgcaggttagaaaccagctcgtgaaccatgtggcggctgccgttcagtttccagttacccatcactaaaggatgtcgcattttaattctccacgcttataagcgaataaaggaagatggccgccccgcagggcagcaggtctgtgaaacagtatagagattcatcggcacaaaggctttgctttttgtcatttattcaaaccttcaaggctttcagatagcgccagcttaatcggttcaacagcgaaggtcagccccttttcgccgttgtccgcgacaacataacgcagtgcaccttctgtctcggtgtaataacgtttgtttttccccgccgttagtaggctctgcagttttttctggctttgtgttttggtcattaatggggtgagtgtgcggatcaccgctgccatgtattcctgagctttcgctttcgcggctttttgctctggcccctggatgggtagccaggtcatttgaatgcttttgatttttaaggtaccgcgctccagcgctgtagaagcatacaagttctcattaattttacttgcagcacgagtgagattggctttgtcgggactgctgtcgatggcacgaaattcgttcagtggcaggctgggattctggctgttaaagtcttctcgaaactggctgatggagagatcgaaagtaggggctccagccagcagataaggcgcggtcgttgccgtatctggtgtttgtgcatgcgcctctgttgtaacggttaatgcagaacataagagaaaaaacagcgtacaccctggcttcattgacagtaccttttgttatgactggctccgattaaaacgatatctgtcgcccttgtcaaaagggtagaatcctggaaaagacaaccatcaaggaacttacatgaccatacagcaatggttattcagttttaaagggcgtattggacgccgtgatttctggatttggataggcctgtggttcgcaggcatgctggtgcttttcagtctggcgggtaagaatctactcgatattcagaccgcggcgttttgccttgtgtgcttgctctggccaacagcggcagtaactgttaagcgcttgcatgatcgcgggcgttccggcgcatgggcatttctgatgattgtggcgtggatgctgctggcgggtaactgggcgattttaccgggtgtctggcaatgggcggtggggcgttttgtcccgacgttgattctggtgatgatgcttatcgatcttggtgcgtttgttggcacacaaggcgaaaataaatatggtaaagatactcaggatgtgaagtataaagccgacaataaaagtagtaattaacctttaatatatctcttactgctatttttttccgggattgttatttccacgatgcaaatgacaatacccggaaaatccttctgaactcttcaccttaagcaatatcaaaaaaaatggtaatccataagatcattacttgtttgttcttcccttaacggcgcattattcttaagtcgtaatcgacagagaggcgaatatacagaggtgccctatgaaagatgtcgtagataaatgcagtactaaaggatgtgcgattgatatcggtacggtgattgataacgacaactgtaccagtaagtttagccgcttttttgccacccgcgaagaagcagagtcttttatgaccaaactgaaagagcttgccgccgctacatcctctgcagatgaaggggccagcgtggcctataagattaaggatctggaggggcaagttgagcttgatgcggccttcactttcagttgccaggccgagatgattatttttgagttaagtctgcgtagcttagcttgatggagttgctttagaaggagttaaacatggcttataaacacattggcgtggcaatttccgggaatgaagaagatgccttactggtgaataaagccctggagctcgccagacataatgacgctcacctgacgttaattcatattgatgatggcttaagcgagttgtatccgggtatctacttccctgcaacagaagatattcttcaattgttgaagaataagagcgataacaagctgtataaactgacgaaaaatattcaatggccgaagacaaaactgcgtattgaacgcggagaaatgccggaaacactgctggaaattatgcaaaaagagcagtgcgacctccttgtctgtggtcatcatcacagttttatcaaccgtttgatgccggcatatcgcgggatgatcaataagatgagtgcggatttgctcatcgtgccgtttatcgataagtaaccgcttaccagtaatgctccgctgtcatatggcccggtcggcgacgtaaatgtttcgtcatctgccgggtctctttcagcaactgttgtgtatcgcgcaccatctgtggattgccgcacagcatcacatggctggtttctttattcatcggcaggccaatcgtgctttccagttccccactttcaattaatgccggtatccgtccggtgaggctccccgctgccgtttcccgactgaccaccgtctgaatgcgcagttttccttcgtagcgtttttccagttcctgcatcagtggcaaatagcttaagtcggcggcataacgtgcggcgtgcaccaggaccagatttttgaagcgatctaaatctttacctagttgcagaatgcttaaataagggccaatcgctgtaccggttgccagcatccatagcgtttcgcagtgcggcacttcatcgagcacaaagaatcctgccgcttcgctaaccacctgcacttcatcgcctggtttcagtgccgccagtcgtgggcttaatttgccatcggggacggtgaccaggtaaaactccagatcgggattatcggggctgtttacataggagtaggcgcgctggacgcgttcgccgtcgatttcaaggccaagcttggtaaattgcccggcggtaaacggaagcacgggggcgtgaacggtgagactaaacagggcgtcggtccagttctgcactttagtgactttgcctgttacccaatcagccatgtttttctcctgttttgattgacttgccttatcttcgttctccgaacaaaaaaattccagtcccgaaggactggaaggctcaatcgatcaaatcaatcagaggatgtgcacctgcatttccgggtctttgcgatccagatagtggatggactgaatgcggcgaatggtgcgactcttgccgcggatcagcagcgtttcggtagtcgcgatattgcctttgcggctaatgccttccagcagatcgcctttggtaataccggtggcagagaagatgacgttatcgctgcgcgccatatcgcccaggcgcaatactttaccggcttcgatgcccatcgctttgcagcgtgccagctcctgctcgccaatgcgacgattctcttcgttgtcgcctttgacgtcatgacgcgccagcagacgaccgttcatgtcgccatctaatgcgcggatcaccgccgcagaaactacgccttccggcgcgccaccaataccgtacagcacgtcaacttcgctgtctggcatacaggtgagaatactggccgcaacgtcgccgtccggaatagcaaatacgcgtacgccgagttgctgcatttcagcgataacggcatcgtggcgtggtttagccagaatcgttaccgtcagttcgctcaacggtttgccgagcgccgccgctacattgcgcaggttatccgccagcggcaggttcagatcaatggtgcctttggctcccggcccgacaatcagcttctccatatacatatccggcgcattgaggaagcagcctttatcgcctactgccagcaccgccagcgcgttagcctggcccatcgccgtcatgcgcgtgccttcaatcggatcaacagcaatatctaccgcgtcgccgcgaccagtaccgactttttcaccaatgtagagcatcggtgcttcgtcgatttcaccttcaccaatgacgatggtgccgtcaatgttgacctggttgagcataatacgcatggcgtttaccgccgcgccgtccgcggtgtttttatcgccgcgtcctaaccatttgtagccagccagcgccgcactttcggtgacgcgggaaaattcgatggcaagttctcgtctcatagcaaactctaagcagtaaggaatggcgcgaagtgtagcacaggggaagggagggattattgatgtgtgcggggttgcccccgcacgtttcgggactaccggatgcggcataaacgcttcattcggcatttacattattcgtcgtgttcttcccacgccatcgcgcgtttaaccgcttttttccagcctgcgtaacggtaattacgctcagtggtttcgatgcctggacggaactcgcgctcaatcaccgctttctcttgcagctcgtcgaggttctgccagaagccaaccgccaggcctgcgagataggccgcacccaatgcggtgacttcgcgcacttccgggcgctcaacgcgggtgccgagaatatcggactggaactgcatcaggaaattgtttgctactgcgccaccatccacgcgcagggcgtgcagacggataccagagtcggcctgcatcgcttccagcacgtcacgcgtctgataagcaatagactccagcgtcgcgcgtataatgtggttagcgttcaccccacgagtcagaccgaaaatcgccccgcgcgcatacgggtcccagtacggcgcacccagcccggtaaatgccggaaccacatacacaccattggtgttttgcactttggtggcgaaatattcggaatcgtaggcgtcgttaatcaacttcatttcatcgcgcagccactgaatggatgcgcctgccataaacaccgcaccttccaacgcatagttcacttcgccagtcgggccgcaggcgatggtggtcagcaggccgttttcacttttcaccgctttctcgccagtgttcatcagcataaagcagccagtgccataggtgttcttcgccatcccttctttcacgcacaactgaccaaacagcgcggcctgctggtcaccggcgatcccggagattggaatacgcgtgccgcctttgccgccaatgttagtctgaccgtatacttcggaagaacgacgcacttctggcagcatctcgcgcggaatatccagcacttccagcattttgtcgtcccagtccagggtatggatgttgaacaacatggtacgagaggcgttggtgtaatcggtcacatggacacggccctgagtcattttccagataagccacgtatcaaccgtaccaaacagcaattcaccacgacgtgcacgctcgcgagagccttccacatggtcgaggatccacttcactttggtgccagaaaagtacgggtcaatcaccagaccggtattgctgcggatataatcttctaaaccgtcacgttttaaatgctcgcagatttctgcggtacgacggcactgccagacaatggcgttatagataggcttgccggtttctttttcccagacaatagtggtttcacgctggttcgtaataccgatagctgcaatttgatcggaactgatatcggctttcgccagcacttctaccagcgtggagctttgggtggcccagatttccattgggtcgtgttctacccaacctggttttgggtagatttgctcaaattcgcgctggctcacgctaatgatattggcatcgtgatccattacgaccgcgcgggagctggtggtgccctggtcgagcgcaacgatatattttttttcagtcatgtttaattgtcccgtagtcatattacaggctagctttttgttcactaggagttgtggtttccttttcttccacaacacagatatcgcaaggcaaatggcgaccaatcagtttgcggtaggcaaatgcacctacaatcgcgccaacgatagggccgaaaagcggcaccaggaagtaaggaatgtctctgccgccggtaaaggcgacattgccccagcccgccagccaggcaaagactttcggaccgaagtcacgcgctgggttcatggcaaaacctgtcaatgggcccatagatgcgccaatgaccgcaatcagtagaccaatcagcaagggagccaaagggccgcgtggtacaccgttgccatcgtccgttaacgccaggatcagccccatcagaatagcggtaatcaccatctcaactgcgaaagcctgcacaaaattgatatgaggattagggtaagtagagaaagtgccagccagatcaacactttcaacgctgccgcgaacaatgtgatgagtctgctcgaagtcgaaaaataaattgtagtaaagcccgtaaactaaagccgcagcacagaaagcgccggcaacttgactaacgataaaaggaataactttgcgcttgtcgaaacaggcaaacagccacaatgcaatggtaacagcgggattaagatgcgcgccggaaacccctgcggtcaggtagatggccattgccacccccagtccccaaatgacactgatttcccactgaccaaaagacgcaccagcgacttttagtgctgcaacgcaacccacaccgaagaaaatcaacaacccggtaccgaggaattcagcaatgcactggcctttcaaggtacttgtttgactcataatcggatcctgaagagttaatgtttgttgtatgcgtgaaagtcacggacctccacgatgcttgtaggcatgctgtaaacttatcgttaacgagcaaaaacgagaaatatcgaacttaaaatgtgtgtgcctcgtcataaaatgagcgttatcgcgccatttattccatctgattgtacatgatgcatgtttgttagatcattcgcgcaacaaatttattaacattttcgattgatgtggattatgtcaccaggagaaggatgaaaagtgtggcaaaccgtaatctgcaaggcgtgccgctggacagcgatggcgcggcttcatacaatcggagctaactaaagtgcgctcgtatttattaaggcgtcaccggtaatcgggacgaggatttttatccatcaacgccttgcaattcaggagaggtatgacaatgagtttagaagtgtttgagaaactggaagcaaaagtacagcaggcgattgataccatcactctgttgcagatggaaatcgaagagctgaaagaaaaaaacaacagtctgagccaggaagttcaaaatgcccagcatcagcgcgaagagctggagcgtgagaacaaccatctgaaagaacagcagaacggctggcaggaacgtctgcaggccctgctgggtcgcatggaagaggtctgattacgcttcatcttccgcgtaatttctttactgtgtaggccaacaggtaacgcagaaaaaaggcaccttgcggtgcctttcttatcattcaatatccagcggatcttcactaagaataatcccggtattgtcggcataaagatggtcgccggagaagaaggtgacaccgccaaaattgacgcggacatcgctttcgccaatgccttcgccagcggcaccaaccggaattgccgccatcgcctggatgccgatatccaactcttccaggtcatctacctgacgcaccgcgccgtaaatgaccagaccttcccattcattttgtactgccagacgcgccagttcagcatcgaccagtgcgcgacgaacagaaccaccgccatcgacgacaagaacacgaccacggccattctgttcgagcagatcgtacagcaacccgttgtcctcgaaacattttaccgtgattatttgtccgccaaagctcgcccgtccgccaaagttggagaacagcggttccacgacgttaacatcttcttgatagatgtcacaaagctcggaagtatcgtatttcataggcttaacattcagttgctgcgagaattttcagtatatcgcgctatgtgggctgttggcaaaatcatcaattgttaattgatatttgtcagttatgctgcccactggcttaggaatatccctaaaacaaacagcaggttagtcagtaacgctcccttgacagtacgttccagcattggtcgcatcgccaccgggtccatttcccgcatcacataacgggcttgcttcaccagtaatggtgccgccagcaggaacagccagccccacaggctatgcaggctaaagagattaaacagcgccagacacaccaggctgcccatcagcaggcaggcatgataacgacgcgcgttcacttcacctaagcgcaccaccagcgtgtttttgccattttcgcggtcgctattgatatcacgcaggttattaatattcagtactgccgttgccagcaggccgcatgcggtcgccggaaggatcagtgccggaatcaatgtatgagcctgtaaataccagctccccatgacactcaaccagccaaagaaaaccagtacggaaatatcacccagaccgatataaccataaggacgattgcccacggtgtaggtgatagcggcaatgatgctcaacccgccaagaatcaggaaaccgacaaaatcggccagcgtatggcatgccactgcaaccagtgccagcccggagagacagatgagcacgacggtaataatgagcgcccgtttcatctcttgctgggtaatgacccctttttgcatgccgcgtagcggcccaatgcggtcaggtttatcgctgccttttaccgcatcgccgtaatcattggcgaggttagaaaggatctgtaatagcccggcggtaattagtgccagcagggcgaccagcggatcgaagtgaccttgccaccatgccagcgctgtcccgacgataattgcagcaaaggcgagggggagggttttaggtcgtaaactttccagccacgcctgagttcggctaatttgttgttcagtcataatacgcgccaataaaaatggggcctttcagccccatcaaacaatgatgaaaatgattgaacgcgattataggataaaacggctcagatcttcatctgccaccaacgcatccagatgtttgctcacataatctgcgtcaatagtgatattttgaccgcttaaatcgctggcgtcgtaggaaatctcttccattaaacgctccagaacagtgtgtaaacgacgagcaccgatgttttcggtagattcgttcacctgccatgccgcttccgcgatgcgtttaataccggagtcggtaaactcgatatttacgccttcagtcgccatcagtgctttgtactgcacggtgatagaggcattcggctcggtcagaatacgctcgaagtcgctggtggtcagcgcctgcagttcaacgcggattggcagacgaccttgcagttccgggatcaggtcagacggtttcgcaatctggaacgcgccagaagcgataaacagaatgtggtcagttttgaccatcccgtgtttggtggaaacggtgcaaccttctaccagcggcagcaggtcacgctgaacgccttcacgagaaacatccggaccggaagactcgccgcgcttacagattttgtcgatttcgtcgataaacacgatcccgtgctgctcaacagcgtcgatagcgtcttgcttcagctcttccgggttcaccagtttcgccgcttcttcttcaatcagcagcttcatggcgtctttgattttcagcttacgcgctttttgcttctggccgcccaggttctggaacatggactgcagctggctggtcatctcttccatgcccggaggagccataatttcaacgcccatcggtgctgcggcaagatcgatctcgatttctttgtcatcaagctggccttcacgcagttttttgcggaatgcctgacgagcagcggacggttcctgctgctgttcggtctgtccccagttgtttttagcaggtgggatcagcacgtcgagaatacgttcttctgccagttcttcagcgcgataacggtttttctcgatagcctggacgcgtaccattttcacggcggcatcggtcagatcgcgaataatagaatccacttccttaccgacgtagcccacttcggtgaatttggtcgcttcaactttgatgaacggcgcattcgccagcttagccagacgacgggcgatttcagttttaccgacaccggtcgggccgatcatcaggatatttttcggggtcacttcatggcgcagctcttcgttgagctgcatgcgacgccagcggttacgcagagcaatcgccacagaacgcttggcgttgtcctggccgatgatgtgcttatccagttcgctgacgatttcgcgtggggtcatttcagacatgggagatccttacgctttgtagcttaattcttcgatggtgtggaaatggttggtatagatgcaaatgtcgcctgcaatatccaacgccttttcagcaatttcacgggcgctaagttcagtgttttctaacagcgcgcgcgccgcagcctgggcgtaagggccgccggagccgatagcaataagatcgttttctggctgcaccacgtcaccgttaccggtgatgataaggcttgcagtttcatccgcgactgccagcagtgcttcaagtttgcgcagcatgcgatcggtacgccagtcttttgccagctcaacggcggctttgaccagatggccctgatgcatttccagtttacgttcaaacagttcgaacagcgtaaaagcatccgcagtaccgcccgcaaagcccgcgatgactttgtcgttgtacagacggcggacctttttcacgttgcctttcattacggtattgcccaacgtggcctgaccatcaccagcgatgaccacatggccgttacggcgtacgcttactatagttgtcacgagctgaccccttggttacgaatacagagtacaaaccccgtacaaaagtacggggcataatgcaattatagatgggggggattttgagggtttcaacccccggcggcgagccgaatgcagtttgtatgacccgccatcttcaaccgattgagggtgctgtctgcgttctctttgcctttcaccgggccaatgaccacacgattccagccattgttggtggtgattttgctgtcaaagccttcgaacgccagctgagcacgtaccgtctctgcctgttccgcgcctctgaagctaccgcactgcaccatccagcggcgttcgtcttttttctccgccgtcggttttggcgcgtcagcggcacgagcaactggcgcagcttgctgcggcttgctctgcgcagtcgtgtgcgcaggagtttgcagcagatcctggtacggctgctgagaagaagccggtttagactggcgcggttgcgcctgtaccggtgcggcttggctcgtacgcgtctgctgctgccagctttgttcagtcgtacggctctgctgagccaggcgttgctgttccgctaattgctgcgcctgacgttggcgctgtagcgtttgctgacgctgttccggcgtctgttcattccacggaacttcaaccagctgcgttggctgctggcgcatatcagcctgcatttgttcaagaagctgacgttgttctggtgtcagttgctccggcgttttcacttcaccaccggcagaaggttctgtgggcgcacgcactcccggctggcgactttccagctctttaatgtagcgccagcgttcttctggttttggtggtagtccgtttccggtcactttctggctttgcagcgtctcggactcttctttcttgtgatgcgtaatgaagtacagaccaccgataaaggtcacaagaacggcggcagcaatagcgaccatagcgggagaaaccgcaggcagatttcgttgctttttccgactggtgctcttttttcgccggctaggtgccggttggctgcggcgtacataatctcgttgtgccactatcgtttcgctgtatttattcgttcgtcagcccgccatgttacttaagcggcgggcctttgaccagtcacggcagtcttaaaggtttactttaaggtaacgcgcgtgtacttccccggatgataagttcgcagtccattaaacgagagccactgccaacgtgttgcccctgcatttgatcaagcaataacagcatagcttcccgaccgatttcgtaacgcggctgcgcgatggttgtcagcggcggatcacaaaattgcgtcaggtcgatgttatcaaaaccgattatggaaaggtcttccgggactttcagcccctggcgttttgcctgagaaagtgcgccgagcgccatcacatcgctatggcagaagacagcagtaggcggttgtggaagatcaagcagctgctgcatcgctttgcttccggcttcgaaggtgaagtcgccacgggcgatgtattgcggatcaaccataatgccgcagcgacgcagcgcctgaacatagccttgcaggcggtagtgacacagcggcatctcttcgggaccggctatacagccaatccgtttatgcccttgctcatataaataatttactgcatcaaatgcggcggtcagattgtcgatatgaactgtaggcagctccagctccggtgcaaattcgttcgccatcaccatcggcggcagattacgctgttcctcaatgctggcatcaaacggcagcctactacccagcaacaacatgccatcaatttgcttggtgatgatcaaatcgataaaggttttttcctgctgattttgatgcgcacagtcgccaatcagcaccagatatccgtgatttgccgccgtaacttcgataccgcgaataatttcgctaaagaagggatcgcagatatccgggacaatcaccagaatggtgcgggattcattacgcttgacgttgcgccccataggctgcggtaaataacccacttcccgggccgctttttcaacccgattacgggtggcctgggagactttatcgggattcattaatgctcgggagacggtcgctgtagagacttttgccttgagggcaacgtctttcatggtcgcggcagtttcctgcttcttcgctttcacactcactcctcgcctggcacgtcaggcgtactacatccatgtttacttcacatcggcaacatttttagcagatagcgcgtgaaaacggttacagaattttcatgaaaagtgtgatgaatattgaatttttcgatccgcctcgcatcgtgagcggtttaaccctcaatcggatcaacatccagcacccatttcaccttacgggaatccggtattgtattgatgagcgccagcgtaccgttaatgatgtgttgcaagcgcacgcgggaagggtgctgcaacaatatctgccagcgccagcgaccgccacgtttaggtgccagagccggaaccggaccgagaacccacagtttctcgtctgccagtgggctggagaggatcagattacgcagttgttgcaggaacaatggcgcgtgctgattgttatgatcttccgcacgcacaatcacatggctggtccacggcggtagctgcatcattcgccgctcagccagcgcctgttcggcaaaggcgtcgtagcctttatagagcaacgtttgcaacagaggatgttccggatggtgcgtttgcagcaccacttcgccctgtttacccgcacgcccggcacgaccggcgacctgggtgtaaagctgagcgaaacgctctgcgctgcgaaaatcggcagaaaacagcgcgccgtccacgtccagtaatgcaaccagcgtcacatccgggaaatggtgacctttcgccagcatttgtgtaccaatcaaaatccgcgcgccgccgcgatgtacttctgccagttgctgttccagcgcccctttgcggctggtggtatcgcggtcgatacgagaaatgggcacgccggggaacaacggcgcgagcgtctgttcaagctgttcggtgcccagccccacggggaccaggtgcgtggaaccgcaggaagggcactggcgcggcaccggacgctgactgtcacagtggtggcagcgcagatggtgctgcgcctgatgcagcgtgtagtagtgatcgcaacgtgggcattcggcaatccagccacagtcgtggcacagcagtgcaggcgcaaagccacggcggttaagaaagagaatgacctggttatcagcctgtaaatgctggcgcatacgagtgattaacgccggagccagacctgcctgcaccttctgaccttttaaatccagcacatgttgaattgccggacgcgcattccctgcccgacgggtcaggcgcagcaggcggtattttttctgctggacgttgcataacgtttccagcgcgggcgttgcggagccaagaataatcgggatttgctcgctgtgcgcacgatacaccgccaggtcgcgggcatgatagcgccagccttcctgctgcttgtaggagctgtcgtgctcttcatcaatgacaatcacgccgagatttttaaacggcgtaaacagcgcggagcgggtgccgatcacaatcgccgcctcaccatttttcgctttcagccacgcgctaagacgctcgctgtcgttcaggccggaatgcagaacttccacgggggcattaaaacgttcacgaaaacgggcgatagtttgcggtgtcaggccgatttccggcaccatcaccagcgcctgtttgccctgagcgagcacgttttccagtacgctgagataaacctccgttttaccggaaccggtaacgcccgccagcagccaggcagaaaaagtatctgccgcgctatgaattgcgccaacggcggtggcctgttcggtattcaatcgcaaccgctcaccagaaacggcatagttcgttcgccagtcgctaaactctggtgtttcacttgctaaatcacacagaccttttttgcgtagcgcctgcaacgcggcatcattaaattcgagcgtggcgacctggtcgcgccagattttgccttgccgtaacgccgccagcgcctgttgttgcttgggggagcgtttcaggctgttcagatccaccgcctggccttgttcagtggcaaaccagtaccacatcggcgcgttcgccgcaggccgcccctggcgtagtaaaatcggcaaggcatgaaacagcacatcgccaatcggatgatgatagtaatctgccgcccatagcagcaatcgccagacggagtgagtaaacaccggctcactatccagcacttcgactaccgcttttagctcattgagcggcagttcgctggcatcgctaacacttaccacaatcccgatgcgctcctgctgtttgccaaacggcacgcgcacgcgacacccagctttaaccgtcatgccttctggcagcagatagtcaaaggtacgaggaagcggaacgggcaaggcaacgtgggcaacgggcatagcatcatcctgacttgaaattcggtgggttagtatacacattgccgtagaagagtgcggatcagtttgcatacgctggttaatttctgtatgatttcgcgccttcgtacgaaatgatcgtattgaagctatacttttaacatcgcgtggtgtctggcgttagggctggaagagcgacgcggccttaaaccgaggttttcccatgaaaaaagatattcacccgaaatacgaagaaattactgctagctgctcttgcggtaacgtaatgaaaatccgctccaccgttggtcatgacctgaacctcgacgtgtgcagcaagtgccacccgttcttcactggcaaacagcgtgatgttgctaccggtggccgtgttgaccgcttcaacaagcgtttcaacatcccgggcagcaaataagaccggatttccgaaaaaagcgccgcacggcgctttttttgtgcctgaattttggtcgtattaccagctaaacagcggccattctttggcgaccgtggtgagttgtggcgcatcgaaaacggcttgtgggctgaccaccgtttcctcaagcggaatattcttgccgtaacgttctttgagctttgcctgaacttgtgggctgctcaggtcgaactctttcaacttctgctgctcgcccacgcgcattcccagcgcgttctggtaaaccttccacaccacttcgctacagtactggcgatcgtcgctccaactgaagctgaaatcatacggtttaccgagataacgttttgccgtttgcgccagtttttgctgttgttcaacactcagtccgccttcaacgcggcgaacaacgtatttgcccttttcaccatgggcgatccactgcttgagcggggtgtatttcaccgggccgactgcttcaaaaacgtagggctttttgttgcgtatcaccagcataccggtgtggctataatcggtatgggtcgccagttggatcgctttactttggctactgcgagagatctgaaagatgatgtcgccggtttgtggctgccaggcaaaggcaggtacagaaaccagcaggctgaggatcagcagcctgtttttcatagttaaacgtccatgtataaaaagcggtgggtcgcagacaacgtgctcgttgtttatgccggatgcggcgtgaacgccttatccggcctacaagttcgtgcaaattcaataaattgcaatatgacgtaggcctgataagcgtagcgcatcaggcgattccactccgcgccgctcttttttgctttagtattcccacgtctccgggttaatccccatctcacgcatgatctcttttgccgcttccgggatttcgtcgctgcgctctttacgcagatcggcatcatccggcaaaggttgcccggtaaaggcatgcagaaacgcttcgcacagcagctcgctgttggtagcgtgacgcaggttgttcacctgacgacgcgtgcgttcatcggtgaggatttttaacaccttaagaggaatggaaaccgtaatctttttgacttgttcactcttcttgccgtgctcagcgtatgggctgatatattcgccgctccattcagccatgagatacttaatcctcttcgtcaataaattgagaccagaccacacagttgatgtgggtactgaccgtaaacccgcatagtttaccgtacaggcgttaccgtgacatcgtgtaatgcacctgtcggcgtgataatgcatataattttaacggctatttgggatttgctcaatctatacgcaaagaagtttagatgtccagatgtattgacgtccattaacacaatgtttactctggtgcctgacatttcaccgacaaagcccagggaacttcatcacatgacgcgtaaacaggccaccatcgcagtgcgtagcgggttaaatgacgacgaacagtatggttgcgttgtcccaccgatccatctttccagcacctataactttaccggatttaatgaaccgcgcgcgcatgattacagccgtcgcggcaacccaacgcgcgatgtggttcagcgtgcgctggcagaactggaaggtggtgctggtgcagtacttactaataccggcatgtccgcgattcacctggtaacgaccgtctttttgaaacctggcgatctgctggttgcgccgcacgactgctacggcggtagctatcgcctgttcgacagtctggcgaaacgcggttgctatcgcgtgttgtttgttgatcaaggcgatgaacaggcattacgggcagcgctggcagaaaaacccaaactggtactggtagaaagcccaagtaatccattgttacgcgtcgtggatattgcgaaaatctgccatctggcaagggaagtcggggcggtgagcgtggtggataacaccttcttaagcccggcattacaaaatccgctggcattaggtgccgatctggtgttgcatagttgcacgaaatatctgaacggtcacagtgacgtagtggccggcgtggtgattgctaaagacccggacgttgtcactgaactggcctggtgggcaaacaatattggcgtgacgggcggcgcgtttgacagctatctgctgctacgtgggttgcgaacgctggtgccgcgtatggagctggcgcagcgcaacgcgcaggcgattgtgaaatacctgcaaacccagccgttggtgaaaaaactgtatcacccgagcttgccggaaaatcaggggcatgaaattgccgcgcgccagcaaaaaggctttggcgcaatgttgagttttgaactggatggcgatgagcagacgctgcgtcgtttcctgggcgggctgagcttgtttacgctggcggaaagtttagggggagtggaaagtttaatctctcacgccgcaaccatgacacatgcaggcatggcaccagaagcgcgtgctgccgccgggatctccgagacgctgctgcgtatctccaccggtattgaagatggcgaagatttaattgccgacctggaaaatggcttccgggctgcaaacaaggggtaaaaatgagtgtgattgcgcaggcaggggcgaaaggtcgtcagctgcataaatttggtggcagtagtctggctgatgtgaagtgttatttgcgtgtcgcgggcattatggcggagtactctcagcctgacgatatgatggtggtttccgccgccggtagcaccactaaccagttgattaactggttgaaactaagccagaccgatcgtctctctgcgcatcaggttcaacaaacgctgcgtcgctatcagtgcgatctgattagcggtctgctacccgctgaagaagccgatagcctcattagcgcttttgtcagcgaccttgagcgcctggcggcgctgctcgacagcggtattaacgacgcagtgtatgcggaagtggtgggccacggggaagtatggagcgcacgtctgatgtctgcggtacttaatcaacaagggctgccagcggcctggcttgatgcccgcgagtttttacgcgctgaacgcgccgcacaaccgcaggttgatgaagggctttcttacccgttgctgcaacagctgctggtgcaacatccgggcaaacgtctggtggtgaccggatttatcagccgcaacaacgccggtgaaacggtgctgctggggcgtaacggttccgactattccgcgacacaaatcggtgcgctggcgggtgtttctcgcgtaaccatctggagcgacgtcgccggggtatacagtgccgacccgcgtaaagtgaaagatgcctgcctgctgccgttgctgcgtctggatgaggccagcgaactggcgcgcctggcggctcccgttcttcacgcccgtactttacagccggtttctggcagcgaaatcgacctgcaactgcgctgtagctacacgccggatcaaggttccacgcgcattgaacgcgtgctggcctccggtactggtgcgcgtattgtcaccagccacgatgatgtctgtttgattgagtttcaggtgcccgccagtcaggatttcaaactggcgcataaagagatcgaccaaatcctgaaacgcgcgcaggtacgcccgctggcggttggcgtacataacgatcgccagttgctgcaattttgctacaccagtgaagtggccgacagtgcgctgaaaatcctcgacgaagcgggattacctggcgaactgcgcctgcgtcaggggctggcgctggtggcgatggtcggtgcaggcgtcacccgtaacccgctgcattgccaccgcttctggcagcaactgaaaggccagccggtcgaatttacctggcagtccgatgacggcatcagcctggtggcagtactgcgcaccggcccgaccgaaagcctgattcaggggctgcatcagtccgtcttccgcgcagaaaaacgcatcggcctggtattgttcggtaagggcaatatcggttcccgttggctggaactgttcgcccgtgagcagagcacgcttagcgcacgtaccggctttgagtttgtgctggcaggtgtggtggacagccgccgcagcctgttgagctatgacgggctggacgccagccgcgcgttagccttcttcaacgatgaagcggttgagcaggatgaagagagcttgttcctgtggatgcgcgcccatccgtatgatgatttagtggtgctggacgttaccgccagccagcagcttgctgatcagtatcttgatttcgccagccacggtttccacgttatcagcgccaacaaactggcgggagccagcgacagcaataaatatcgccagatccacgacgccttcgaaaaaaccgggcgtcactggctgtacaatgccaccgtcggtgcgggcttgccgatcaaccacaccgtgcgcgatctgatcgacagcggcgatactattttgagcatcagcgggatcttctccggcacgctctcctggctgttcctgcaattcgacggtagcgtgccgtttaccgagctggtggatcaggcgtggcagcagggcttaaccgaacctgacccgcgtgacgatctctctggcaaagacgtgatgcgcaagctggtgattctggcgcgtgaagcaggttacaacatcgaaccggatcaggtacgtgtggaaagcctggtgcctgctcattgcgaaggcggcagcatcgaccatttctttgaaaatggcgatgaactgaacgagcagatggtgcaacggctggaagcggcccgcgaaatggggctggtgctgcgctacgtggcgcgtttcgatgccaacggtaaagcgcgtgtaggcgtggaagcggtgcgtgaagatcatccgttggcaagtctgctgccgtgcgataacgtctttgccatcgaaagccgctggtatcgcgataaccctctggtgatccgcggacctggcgctgggcgcgacgtcaccgccggggcgattcagagcgatatcaaccggctggcacagttgttgtaatttcagaaatttaataatgcccggtactcatgttttcgggtttatggtttctaatgaaatatattgaattatcataggattaggccggattaagcgtttacgacgaatccggcaagaagcaataagtacatggttagtttatatttgcagtccggtttgctttgcataccggattttctttttcttaccatcctgaagttttttcatcttccctgatttttcctcaccatcattggtcatttttcggttgacgcccttcggcttttccttcatctttacatctggacgtctaaacggatagatgtgcacaacacaacatataactacaagcgattgatgaggtaaggtatgagcttttttcacgccagccagcgggatgccctgaatcagagcctggcagaagtccaggggcagattaacgttagcttcgagtttttcccgccgcgtaccagtgaaatggagcagaccctgtggaactccatcgatcgccttagcagcctgaaaccgaagtttgtaagcgtgacctatggcgcgaactccggcgagcgcgaccgtacgcacagcattattaaaggcattaaagatcgcactggtctggaagcggcaccgcatcttacttgcattgatgcgacgcccgacgagctgcgcaccattgcacgcgactactggaataacggtattcgtcatatcgtggcgctgcgtggcgatctgccgccgggaagtggtaagccagaaatgtatgcttctgacctggtgacgctgttaaaagaagtggcagatttcgatatctccgtggcggcgtatccggaagttcacccggaagcaaaaagcgctcaggcggatttgcttaatctgaaacgcaaagtggatgccggagccaaccgcgcgattactcagttcttcttcgatgtcgaaagctacctgcgttttcgtgaccgctgtgtaagcgcgggcattgatgtggaaattattccgggaattttgccggtatctaactttaaacaggcgaagaaatttgccgatatgaccaacgtgcgtattccggcgtggatggcgcaaatgttcgacggtctggatgatgatgccgaaacccgcaaactggttggcgcgaatattgccatggatatggtgaagattttaagccgtgaaggagtgaaagatttccacttctatacgcttaaccgtgctgaaatgagttacgcgatttgccatacgctgggggttcgacctggtttataaatagtgtggcttttgtgaaaatcacacagtgatcacaaattttaaacagagcacaaaatgctgcctcgaaatgagggcgggaaaataaggttatcagccttgttttctccctcattacttgaaggatatgaagctaaaacccttttttataaagcatttgtccgaattcggacataatcaaaaaagcttaattaagatcaatttgatctacatctctttaaccaacaatatgtaagatctcaactatcgcatccgtggattaattcaattataacttctctctaacgctgtgtatcgtaacggtaacactgtagaggggagcacattgatgagcacgagtgacgatatccataacaccacagccactggcaaatgcccgttccatcagggcggtcacgaccagagtgcgggggcgggcacaaccactcgcgactggtggccaaatcaacttcgtgttgacctgttaaaccaacattctaatcgttctaacccactgggtgaggactttgactaccgcaaagaattcagcaaattagattactacggcctgaaaaaagatctgaaagccctgttgacagaatctcaaccgtggtggccagccgactggggcagttacgccggtctgtttattcgtatggcctggcacggcgcggggacttaccgtagtatcgatggacgcggtggcgcgggtcgtggtcagcaacgttttgcaccgctgaactcctggccggataacgtaagcctcgataaagcgcgtcgcctgttgtggccaatcaaacagaaatatggtcagaaaatctcctgggccgacctgtttatcctcgcgggtaacgtggcgctagaaaactccggcttccgtaccttcggttttggtgccggtcgtgaagacgtctgggaaccggatctggatgttaactggggtgatgaaaaagcctggctgactcaccgtcatccggaagcgctggcgaaagcaccgctgggtgcaaccgagatgggtctgatttacgttaacccggaaggcccggatcacagcggcgaaccgctttctgcggcagcagctatccgcgcgaccttcggcaacatgggcatgaacgacgaagaaaccgtggcgctgattgcgggtggtcatacgctgggtaaaacccacggtgccggtccgacaagtaatgtaggtcctgatccagaagctgcaccgattgaagaacaaggtttaggttgggcgagcacttacggcagcggcgttggcgcagatgccattacctctggtctggaagtagtctggacccagacgccgacccagtggagcaactatttcttcgagaacctgttcaagtatgagtgggtacagacccgcagcccggctggcgcaatccagttcgaagcggtagacgcaccggaaattatcccggatccgtttgatccgagcaagaaacgtaaaccgacaatgctggtgaccgacctgacgctgcgttttgatcctgagttcgagaagatctctcgtcgtttcctcaacgatccgcaggcgttcaacgaagcctttgcccgtgcctggttcaaactgacgcacagggatatggggccgaaatctcgctacatcgggccggaagtgccgaaagaagatctgatctggcaagatccgctgccgcagccgatctacaacccgaccgagcaggacattatcgatctgaaattcgcgattgcggattctggtctgtctgttagtgagctggtaagcgtggcctgggcatctgcttctaccttccgtggtggcgacaaacgcggtggtgccaacggtgcgcgtctggcattaatgccgcagcgcgactgggatgtgaacgccgcagccgttcgtgctctgcctgttctggagaaaatccagaaagagtctggtaaagccagcctggcggatatcatagtgctggctggtgtggttggtgttgagaaagccgcaagcgccgcaggtttgagcattcatgtaccgtttgcgccgggtcgcgttgatgcgcgtcaggatcagactgacattgagatgtttgagctgctggagccaattgctgacggtttccgtaactatcgcgctcgtctggacgtttccaccaccgagagtctgctgatcgacaaagcacagcaactgacgctgaccgcgccggaaatgactgcgctggtgggcggcatgcgtgtactgggtgccaacttcgatggcagcaaaaacggcgtcttcactgaccgcgttggcgtattgagcaatgacttcttcgtgaacttgctggatatgcgttacgagtggaaagcgaccgacgaaagcaaagagctgttcgaaggccgtgaccgtgaaaccggcgaagtgaaatttacggccagccgtgcggatctggtgtttggttctaactccgtcctgcgtgcggtggcggaagtttacgccagtagcgatgcccacgagaagtttgttaaagacttcgtggcggcatgggtgaaagtgatgaacctcgaccgtttcgacctgctgtaatctgaccccgttcagcggctgcttgctggcagtcgctgaacgttctttaccagcgtatagtgggcgaacgaaaactacacactggatctctcatgtctgccgcaggaaagagcaacccactggcaatcagtggcctggttgtgctcacacttatctggagttatagctggattttcatgaagcaagtcaccagttacatcggtgccttcgactttaccgccttacgctgcattttcggcgctctcgttttattcatcgtccttttattacgtggtcgcggaatgcgcccgacaccgtttaaatacaccttagccattgccctgttacaaacctgcgggatggttggtctggcgcagtgggcgttggtcagcggaggtgcggggaaggtggcgatcctgagctataccatgccgttctgggtggtgattttcgccgcgttgtttctcggtgaacgcctgcgacgtgggcaatatttcgcgattctgattgccgctttcggcttatttttggtgttgcagccgtggcaactcgatttctctagcatgaaaagtgccatgctggcaatcctctccggcgtcagttggggggcgagcgcgattgttgctaaacgtctgtatgcccgtcatccgcgcgtggatttattgagcttaacatcctggcagatgctgtatgcggcgctggtgatgagtgtggtcgctttactggtgccgcaacgtgaaattgactggcagcccaccgtgttctgggcgctggcctacagtgcgattctggcgacggcactggcgtggagcttatggttgtttgtattgaaaaacttgcctgccagtattgccagcttaagcacactggccgttcccgtttgcggcgtactcttttcctggtggctgctcggcgagaatccgggggccgttgaaggtagcggtattgtgctgattgtgctggcactggcgctggtgagccgtaagaaaaaagaagccgtcagtgtaaaaaggatctgaattttttcttcatgtggggcgatctcttatttaacaaaataacgataatgccccaccatccgccagttaaacagcacatcttcttcctgcgcgcctgcgccaatgttatgtatcaccagcggcgtaccgtcgcgggcgaagccatcactaaccaccccaatatgtgccagcccgttatccagtcgccaggagacaatatcgcccgcttgatagtcactggggttcttgctggtggggcgtgttttatcatggcggctaaaccaggtttccagattaggcacccgacggtgatcgatgttgctgtccgggcgctttaacttccatttttgcgggtactcagcaaaattcttcgccatatcttcgtgaaccagtttctgcaaatcgaccttctggctgcgcaatgcgcggatcaccacatcggaacatacaccgcgttcttgcggaacatcaccgccaggataagtaagctgcacatacgccggatcgtaaaatagcgtgctgccaatttgctgtctggcaccgtctgcgatggcaaggttggtattggcctggatttgtaccacggttggtggaacggcgggagattttaaggagtggctggtaaatgccgttagcaggctgagcagcgccagactagctttcatctggttcgtccgtgaaaataagagtcacagattcgaccttccgggctaacgattgttctgtagagaaaatgtccagaagcggataaaaaattcctgaacaacgtgggagtttcagattactggcacagagtgccggatgcggagtgaacgccttatccggcctacaaaagcacgcaaattcaatatattgcagagattgcgtaggcctgataagcgtagcgcatcaggcaattttgcgttcaaactcccggacaagccgggagtttggagtaggttattcccactcttgcaggaaacgctgaccgtactggtcggctaccagcagagcggcgtaaacctgatctggcgtcgcgccgccaggcatgttgtgaatggtttcaccttctgcacatgccgcttctgccacaattcgcattttcgccgggacatcttctttaatatccagttgagcgagagttattggcaaacctaccgcatggctaagggcagctacggtttcgatttcctccaccggcgcattttccagaaccagctgcgtcagcgtaccgaatgccactttttcaccgtgataatagtgatgcgcgtccgggatagcggtcaggccgttatgcactgcgtgcgccgcagccagaccaccactttcaaaaccaacaccgctcaaataggtgttcgcttcaatcacgcgctccagcgccggagtcactacatgctgttcggcagcaagcatcgctttttcgccttcttccagcagggtgttgtagcacagttcagccagtgccagcgcagcctgggtgcacttgccgcccgccatggtggtcgcgccgctacgagagcaggcacgcgcttcaaaccaggttgccagcgcatcgccgatacccgccgctaacagacgtgcaggtgcgccagcgacgattttggtgtcgacaatgaccatattcgggttatttggcaacagcagatagcggtcaaactcaccctcatcggtgtagataacagacaatgcgctgcacggtgcatcggtagaggcgatagtcggtgcgatcgctaccggaacacccatgaaatgtgccagtgctttggcagtatcgagggtttttccgccaccgataccgagaattgcgccacactgcgcagtctccgcgatgccacgcagacggtcgatctcattttggctacattcaccgccaaacggcgcaatttctactaccagtccagcatctttaaagcttttctcgacagtggattgagcaaaacctaaaacaaatttgtcacccaccactaaccagcgttctgccagcggcttcaggtattcgcccagacgattaatcacatcagcgccctggatgtatttacccggactttgaataatgcggtccataattgctcctttagagatgagtagtgccaaatgcggcattccagtcgtgttcgaacttctctatagcactctctaccgcaggggtgttgagcatttgttgcgctacatctaagggcagggtgatggattcacatcctgccagtaaacagtccagcgcctgacgcggcgttttaaagctggctgccagcaccatgctttctggcgcgtgcatttctaacagcgtttgcagctcctgaaccgtacgaatgccgtctccgccctgggcatctacgcggttaacatacggagcaacgtattttgcccctgccagtgcggctaataacccttgtgcggcgctatatacagcagtgccaagtgtagtaataccctcttttttcagtattttaattgctgccagaccttcggaagtcaccgggattttcaccacaatacccggaatagcgtcgcgcaggcgcttcgcttcttccaccatcccctgcgcgtcgcggctcatggtctgagcaaacagaatgccctcatcaccaatcgctttttgcagacgcggcagcacttcccatatggactccttgctggcagcgataatgctcgggttagttgtcaccccggcaatggggaatatgcgtgccagacgttcgacttctgcgacgttagcggtgtccagatacagttccatgatgtttccttttacagttccagttcatgttgcagcaggctggcgatagcgtcggcagaggcggcgttaaccagcgcgttacggaattcttcgtgcatgatgcggcgagcgaggcggctgaaaatgcgcatatgctgatcgcccgcagcgtgtttgttcagggttaacataatgatgaattgcgcttcatcatcgccccagcgcaccggcgcttgcagacgcgccacgctgatggtggattgctcaatgtgttcacttttgctgtgtggaatggcaaaactaaagcccagaccggtagagaaaacggcctcgcgcgcccacaagtcggcttccagtttacgcggatagcggcagcggcccgccagcagcaggttatcggtcatgcctttgagcacttcttctttgctgcgccagtcgctttccagtgtgatgcactcggcggtgaccagcggtgcgtcttgttgggtcatgcggaattgcgccagcaggtgttctacttccaggctagtacggcaggccattgcctggttgagcaacttgcggcactcacggctatcaagttgcgccatccgagctttcgccgccggaatacttggtgcgctcatgctgagttcatccagccctaagccgaccagcaacggcagcacggaacctttcgctcccagctcaccgcacagaccaatccatttgccctggcgatgcaccgcttgcacggcgtaatcgagcgcccgcaagaatgccggattcaggctgttgtagtgacgagtaaccttagcgttatcgcgatccaccgccagcagatactgcgtcaggtcattactaccaatactaaagaaatcaatctcttcgcagcattgatcgatgatgaacatcacgctcggcacttccagcatgatgccgagctggattttctcatcaaacggaatgtgttcgttacgtagttgctgtttggcttccgccagtttttctttcacccataagatctcttccatactggagatcatcgggatcatgattttcaggctgccgtgagcggaggcgcggaggatgctccgtagctgcgtggtaaacaagctcgcgtactcttcataaatacgcacggcgcgataaccgaggaacgggtttgcctctgcgggaatgttcagataatcaacgggtttgtcgccgccaatgtccatagtgcgcacaataatgctgcgtccgttggcggattccagcgcctgacaaaaaatgttgtacaactcgctttcgcccggtgcgctggtgcgatccatatagagcatttcagtgcggaacaaaccaacgccttccgcaccattgccgaatgcggcctgcgcttccacggagtgagcgatgttagcggcaatttcaatgcggataccgtcagcggtacgggcttgttgggtcagccagacacgctgttgctcacgcagggcgtcctgtacgcgggcttcttgctgataataacgagctacggcttcccctggctcaaccacaatcgccccggcgttgccgtcgatataaatcgtttgttgctgccacggagtaagggcatcaatatccacaccaaccagcgttggaatgttgaagctacgggcaaggatcaccgtatgactggtggtgccgccgcttttgagcaacaatcctttgaggtgatttttatccagttcgaggaactggctgggggtcagttcatcagccatacaaatggcgggctgcgtcagtttgcccggtgccgggaagcgttgctcaccgtagatttgctggagtaactggaagcagacgtcgcgtacgtccagggcacgttcttgcaggtagctgctgctggaacgggaaaactcttcgcaaaagtgattcgcgctggcaacaattgcttcggcgcagcttaatccggcgctgacgcctgccagtaaatgttcgcgcagggaagtatcgccagccagggatcggtgagcttccagaatcgcgctggtagcaccgtcgctatccagcagacgaaactcaatgtttttcagtaccagcgtcaggccgttttccagtgcggattgctcggcgtcaacgcctttggctgcgggaagattacccagcgcattgagatctaaagaagagatcggcgtcagaatgccgcctgcactaccgctgcacacggtgcgggcgcggataatttgcggattcagattggtcagactaaccggcagtggttccagttcgtcagatttaacttccgccagcggcgcatcgcagtgggggaattcatcgcgcagccattggcttaaacgctggtgcgcttcctgttcgtcggccccggaaatcagtaactggcagttatcgcccgccagcgtatcggtgccaatcagcgcaagggcgcttttggcgttgcccttgcggtcagtgcgcaggttatgccactcaatttgactactaaaagtattacacagcgtttcaacgtggcttgccggacgcgcatgtacgccgttaggtagctcacaaataaattccacaatcagggccattgcctctctcccggtacggttttctgtttacaggataagagcgcacggcaacggcctgccatgtgacaaatctgccaaaagctggacaaatgtaatgtaaccgtcaatttgcgacgcgtctcacaagacgctgttttgcggcatgcttccggtttatcgcaagttatgaggcggatcgcatttttgtactgatattacaaaagtccagtaaatggcctttttatccactgtttgctccgcctgcgattgcctattgtttcctccatcaaaaatatggacatgggctttcgcaagcccgggagcagcttatgaatgagttggtgcagatcctgaaaaatacccgtcagcatttaatgacgggcgttagtcacatgattcccttcgtggtaagcggcggtattttgctggcggtttccgtcatgttgtatggcaaaggcgcagtgccggatgccgtagccgatccaaatctgaaaaaactgtttgatatcggcgttgcgggcttgacgctgatggtgcctttcctcgcagcgtacatcggttattccattgcagagcgttctgcgctggctccgtgcgctatcggtgcctgggttggtaacagctttggtgcgggcttctttggtgcactgatcgccgggattatcggcggcatcgtggtgcattacctgaagaaaattccggtgcataaagttctgcgcagcgtgatgcctatcttcattattcctatcgtcggcacactgattaccgcaggcatcatgatgtggggcttgggcgagcctgtaggggcgttgaccaacagcctgactcagtggcttcaggggatgcagcagggcagcattgttatgctggcggtgatcatgggtctgatgctggcgttcgatatgggcggtccggttaacaaagtggcctatgccttcatgctgatttgcgttgctcagggtgtttataccgtggtggccatcgctgccgtgggtatttgtatcccgccgctggggatggggctggcgacgctgattggtcgtaaaaatttctccgcagaagagcgcgaaaccggcaaagcggcactggtgatgggctgtgttggcgttactgaaggggcgattcctttcgccgctgccgatccgctgcgtgtcattccttccatcatggtcggtagtgtttgtggtgcagtaactgcggcgctggtcggtgcgcagtgctatgcaggctggggtggtctgattgtgctgccggtggttgaaggcaagctgggttatatcgcagcagtggctgtcggagcagtggtgacggctgtttgtgtgaacgtgctgaaaagtctggcgcgtaaaaatgggtctagcactgatgaaaaagaagacgacctggatttggattttgaaattaattaattgaggaacgagccatgacgaaaattattgcagtaaccgcatgtcctagtggtgttgcccatacctatatggcagcagaggcgctggaaagtgccgcgaaagcgaaaggctgggaagtgaaagtagaaacccaggggagtattggtctggaaaatgaactgactgcggaagatgtggcgagcgctgatatggtgattctgaccaaagatatcggcatcaagtttgaagagcgttttgctggcaagaccatcgtgcgcgtcaacatcagcgatgcagtaaaacgtgctgacgccattatgagcaaaattgaagctcacctggcgcaaaccgcttaagttcttctcccgctcgcaagggcgggttcgctttcccacaggagttcctcatgacgaatcgtatctctcgcctcaaaactgcactgtttgccaatacccgtgaaatcagcctggagcgggcgctgctttataccgccagccatcggcaaaccgaaggcgaaccggtgatattgcgccgggcgaaagcaacagcgtatatccttgaacatgttgaaattagcattcgtgatgaagaactgattgccggtaaccgcaccgtaaaaccgcgcgccgggattatgagcccggaaatggacccttactggctgctgaaagagctggatcaattcccgacgcgtccgcaggaccgctttgctatcagcgaagaagataaacgtatctaccgtgaagagttgttcccgtactgggaaaaacgtagcatgaaagatttcatcaacgggcagatgacagatgaagtaaaagccgcgaccaacacgcagattttcagcatcaaccagacggataaaggccaggggcacattattattgattacccacgcctgttgaatcacgggctgggtgagctggtggcacagatgcagcaacattgtcagcaacagccggagaatcacttttatcaggccgcgttgttactgctggaagccagccagaaacacattttgcgttacgccgaactggcggaaacgatggcggcaaactgcacagatgcccagcgtcgcgaagagctgctgactattgcagagatctcccgccataacgcgcaacataagccgcagacgttctggcaggcgtgccagttattctggtacatgaacatcattctgcaatacgaatccaacgccagtagcctaagcttggggcgcttcgaccagtatatgttgccgttctatcagacaagtttaacccagggcgaagatgcggcgttcctgaaagaactgctcgaatctttatgggtgaaatgcaacgacatcgtgctgttgcgctccaccagtagcgcgcgttatttcgccggtttcccgaccggctataccgcactgctcggcgggttaaccgagaacggacgtagcgcggtgaacgtgcttagcttcctttgccttgacgcctatcaaagcgtgcaattaccgcaaccgaacctcggcgtgcgcactaacgccttgatcgacacgccgttcctgatgaaaaccgccgaaaccattcgcttcggtaccggtattccgcaaatctttaacgatgaagtggtggtgccagcgttcctcaaccgtggcgttagcctggaagatgcgcgcgactattccgtagtgggctgtgtggaattatctattcccggcagaacctacggcttgcatgacatcgcgatgtttaatctgctgaaagtgatggaaatctgcctgcatgaaaatgaaggcaatgctgcgctgacttatgaaggtttactggagcagatccgcgccaagatcagccactacatcaccctgatggttgagggcagcaatatttgtgatatcggccatcgcgactgggcacctgtaccgctgctcagtagctttatcagcgattgtctggaaaaaggccgcgatattaccgatggcggcgcgcgttataacttctccggcgtacaggggatcggtatcgccaacctgagcgattctctccatgcgttgaaagggatggtttttgagcaacagcgtttaagttttgacgaattgctgagcgtattaaaagccaacttcgcaacgccagaaggcgaaaaagtccgcgctcgcttaattaaccgcttcgagaaatacggtaacgatatcgacgaggtggataacatcagcgccgaactgttgcgccactactgcaaagaagtggaaaaataccagaacccgcgcggcggctacttcacgccgggaagctataccgtttctgctcacgtcccgttgggaagcgtggttggcgcgacgccagacggtcgttttgccggagaacagctggcagacggcggcttgagtcccatgctgggccaggacgcacaagggccaacagcggtactgaagagtgtcagtaagctcgataacacgctgctgtctaacggtacgttgctgaacgtgaaattcactccggcgaccctggaaggtgaagcaggattacgcaaactggccgacttcttacgggcgtttacccagcttaagttacaacatattcagtttaacgtggtgaacgccgacacgttgcgggaagcgcaacagcgcccacaagattatgccgggctggtggtgcgcgttgccggatacagcgccttctttgtcgaactgagcaaggagatccaggatgacatcatccgccggacagcgcatcagctgtaattaaactgtcgaaggagatccaggatgacaagttccgccggacagcgcatcagctgtaacgttgtggaaacgcgccgcgatgatgtggcgcgcattttcaacattcagcgttatagtctgaatgacggcgagggcattcgtacggtggtcttttttaaaggctgtccgcatctttgcccgtggtgtgctaatccggagagcatctccggcaaaatccagacggtacgcagagaggcgaaatgtctgcactgtgcgaaatgtttgcgtgatgcggatgaatgcccctccggggcgtttgaacggattggtcgcgatatcagccttgacgctctggaacgggaagtgatgaaagatgacattttctttcgcacgtccggcggcggcgtcacgctttctggcggcgaagtgttaatgcaggcggagtttgctacccgttttttacagcgactgcggctgtggggtgtgagttgcgccattgaaactgccggagacgcaccagccagcaagctattaccgctggcgaaattgtgcgatgaagtgttgttcgatttaaaaattatggacgcgactcaggcgcgggatgtggtgaagatgaacctgccacgcgtgctggagaatctgcgtttgctggtgagtgagggcgtcaacgtgatcccgcgtttaccgctgatccctggtttcacgctcagccgggagaatatgcagcaggcgctggatgtactgatcccgctgaatatcaggcagatccatctgttaccgtttcatcagtacggcgaaccgaaataccgcctgctggggaaaacatggagcatgaaagaggtgcctgcgccgagcagtgctgatgtggcaacgatgcgcgaaatggcagaacgggccggacttcaggttaccgtgggaggttaaaatggcatacctggtggcagtaaccgcctgcgtaagcggcgtggcgcatacttatatggcggcggaacggctggaaaagttgtgcctgttagagaagtggggagtcagcattgaaactcagggcgcgctgggaacggagaatcgtttagcggatgaggatatccgccgggcggatgttgctctgttgattacggatatcgagcttgccggtgccgagcgatttgaacattgccgctatgtgcaatgcagcatctacgcattcctgcgtgagccgcagcgggtaatgagcgcggtgcgcaaagtgctttctgcgccgcagcaaacccatcttattctggagtaattattctggagtagtcggtttttctgtcagttggctgtggtactgccggcgatattcgctcgggctgcgttcggtgtttttacgaaacagacggcagaagtagttgctgtcgacaaagccgcaggcgtgcgccacttcttttaccttcaggtcatagcctttcaataacgtcttagcgtgctccagtcgcgtgtgattcaggtattcgttaaaaccaatggcccccgttttttgaaacaggtggctgaggtaatttgggctaatataaaacgcctgtgcaacagattcgcgggtaagcgcggaggcatagcgttcgtcgatataatcgcgaatagcttcaaatagtgcctggctgcgactggcggtctggatttggctgccaagcaaatcgcggcagtggctaagcaggctggcgacgataagccttgccgtttgctgctcctgcggctgcatttgcatttcattgagcgtttgtagcagaaaagaacctatgcgtgggccgcgtcgggcgacgtgttgcttcgccagattttgatattgtttgccatcccattgcacgacgctgaagccgagttgctgtttgccaaacagcacgctaaaggtagtagcgggggcttgccattgtggaaaattccagccaccagcaggaacgtacagcacatcgccgggaactaacgttgctccagcgccggtatcaacaaactcaccttccagcacaatttccagccgtggaaaatcgacctgatacgcaagatcgggcaccgggccgttactgctggcaaagtaaatctggcgcagggacagcgggccgttgatcaggcgggagagcagatagctgacgtcgtgatacatgttattcccttaggtatgtagacgggaaaacagtaactggcattattaaaaaaggccacctgaaaagtgtggcctgaggggagttcgatgtaaacattgcggcagttgtattgccggatgtggcgtaaacgccttatccagcctaccgccgcgatctgtaggccggataagacgcgtcaagcgtcgcatccggcaaatagcgcctggctgataattactgattacccacctgatcgccatagggcagtgtgtcgtaatcgatcagtgcgtttttcttatacgggttaccaatccagcgggtagtttctttgaactgcggattcaccacactacgggttggatcgtaaccgtcgtaagataagcccgccaaatcactccaggtgtggatcagttccgccaggctgtatttacgatcaacatcctggctgaaatcacggggatgagtcgcttgccatttttcactcgtccacagcaggaacggaatggtgtacatatgacgcgtcgggttgtcctcattacgcccctgagttttgtgcggcggcgtgtcgtaaacctcttcaccgtggtcagagaaataaaccaggaaaccgttcgggtttgctgctttaaagtctttaatcaggctggcaaccacatgatcgttatacaggttagcgttgtcataatcgttataactctccagctcttccgcgtttaatcccggcggaacatgatcggtattgccatcaaacttgccctgattttccgggtagcggtatttgtatttgatatgcgtacccagcagatgaacaatgatcagtttcttcggcgcagggtcattcagcacttcctggaacggcttcagcacgttggtgtcgtattcacgcgcactctgcgtacgttgctggttcatgtagtactgcttgtcggtctggcggctaaataccgtcagcatggtattgcgggcggtcatcgtctgctggttggtgatccagaaggttttataacccgcctgtttcatcatgttcatcaggctcggctgcgtcagatacagatccgggttcttttcattggcaaaggtcagcgcctgttgcaggatttcaatggtgtacggacgagacgtaactacgttattaaacacggtcagattcggatcggttttatgcagcgcatccagctccggcgtggtttcacgcggataaccgtacagactcatgcgtccgcgctgggtgctctcgccaatcaccagcactaaagtgcgcggttcgttaccgctttcatctttgaaattagccagtggcggcaaggcattattttcattcagtaactttgttaggctgtttagttgctgacgatactgataatagccggtcaggaattgccacggtgcggcaggctccatacggctggccaggttatccaacgttttctcaaacggcttgtttttgataaacgtattcatggcgatcggatgcagaatcaagccataaagcagggcaaaagagacaacataacgccacggctttggaatatagaccgggcgcaggcgtgtccacagcagaactgccaccgccgtataggccagcgcgataagcacaattttcaggctgaaatactggcttaaatactcgctggcttcgttggtgttggtttcgaacatcacaaacagaacgctctggctgaactcctgaccgtagatgacgtagtagcacagcgccgccagagaggccgcccatagcaccacgccgattactgcggcaataattttaatccgcttcggaaagaggaataccgggatcaaccacaggctactgaataacaggctgtcgcgaatgccgttagtgccactataaccactgatgtaaataatggcctgtagcagagtagagaaaaaccaaaagtagagcagtgcccaacccagggctttccagctaaaaagaggtttagcctggacttctgtggaatgcatagtaagaacctgtcttgaaaaaatatcgccgaatgtaacgacaattccttaaggatatctgaaggtatattcagaatttgaataaaatgcagacagaaatatattgaaaacgagggtgttagaacagaagtatttcagaaaaccctcgcgcaaaagcacgagggtttgcagaagaggaagattagccggtattacgcatacctgccgcaatcccggcaatagtgaccattaacgcttgttcgacgcgaggatccggttcctggccttctttttctgcctggcgggagcggtgcagcaactcggcctgcaatacgttcagcgggtcggtgtaaatattccgtagctgaatagactctgcaatccacggcagatcggccatcagatgggaatcgttggcaatcgccagcaccactttgatgtcttcttcttgcaggttgcgtaactctttacctaacggccacagtgctttgtctaccaggcgttggtcatagtattccgccagccacaggtctgctttggcgaagaccatctccagcatgccgagacgcgtgctgaagaatggccaatcgcggcacatagcctccagctcgctctgtttgccgtcttcgaccactttttgcagcgccgtacctgcacccagccaggcggggagcatcagacggttttgcgtccaggcgaagatccacggaatggcgcgtagactctcgacgccgccggttgggcgacgtttcgccggacgactacccaacggcagtttgcccagttcttgttccggcgtagcggagcggaagtaaggcacaaaatctttgttttcacgtacgtagccgcggtagacatcgcaggagatgacactcagttcatccataatgcgacgccagctctctttcggctccggcggtggcagcaggttggcttccagaatcgccccggtataaaggctcaggctgctgacggtgatttctggcagaccatatttaaagcggatcatctcgccctgttcggttacgcgcaggccgcctttcaggcttcctggcggttgactcagcagcgccgcatgagcaggtgcgccgccgcgaccaatggaaccgccgcgaccgtggaacaacgtcagctcaatacccgctttttcgcaggttttgattaatgcatcctgtgcctgatattgcgcccaggaagctgccatcactcccgcatcttttgcactgtcggaatagccaatcatcaccatctgtttgccctgaatcaggccacgataccagtcaatattgagcagctgggtcatgacatcgttggcgttgttcagatcatcgagggtttcaaacagcggagcaaccggcatcgcaaacccgatacccgcttctttcagcagcaggtggacagccagtacgtcggacggcgttttcgccatgctgatcacgtaggcggcaatggagccttgcggtgcttcggcaatcacctggcaggtatcgagcacttcgcgcgtttcggcgcttggttgccagttgcgcggcagaagcggacgtttggagttcagttcgcggatcaggaacgcctgtttgtcggcctcactccagctttcgtagtcgccgataccgaggtagcgggtcagctcgcccagcgcttcggtatgacgcgtgctctcctgacggatatcaatacggaccagcggtacgccgaaacatttcacgcggcgcagggtgtcgagcagatcgccgttggcgataatacccatgccacacgcctgaagactctggtagcaagcgtagagcggttcccacagttcttcgttttgtgtcagcaggccttctggttttggcagttcttcgcctttcaggcgcgcttccagccatgcctgtgtcgccatcaggcgagaacgcaggtttttcatcagatagcgatacggttctgcggcaccttcttcgccaaccagcgccagcagttcaggggtcgcttcaaccatgctcagttcagaaaccagcacctgaatatctttcaggaacaaatcggtggctttccagcggctgagtagcaggacgtggcgggtgatatcggcagtgacgttcgggttgccgtcgcggtcgccgcccatccagctagtaaaacggaccggaacaaattcgacgggcagtttgtagccgaggttctcttccagttgttcgttcagttcgcgcaggtaatttggtacgccttgccacaggctgttttccactacggcaaagccccatttggcttcatctaccgggcttggacgcagcttacggatttcatcggtatgccaactctgggcgatcaactggcgcaggcgacgcatcagctggttgtgttcgtagtcagcgatatctttgttatcgagctgttttaaacaggcgttcacttccaccattttgtggatcagtgtacgacgggtaatttcggttgggtgagccgtgaggaccagttccaggctcaggctttccactgcttttttgatggtgtcttcgctcagttccggctggtttttcagtttacgcagggtgcgggcgatcacttccgggttgctggcagcttcgcctttcgggctaatgctgtggtattgctcggcggtgttggccaggttcaggaactgactaaacgcacgcgcaacgggcagcagctcgtcgttgctcaaattttgtaaggtggtgagcaactcctggcggttagcatcattgccagcgcgactagatttgctcaacttacggatagtttctacgcgttcaagaatgtgttctcccaacgcatccttgatggtttctcccagcactttgccgagcatactgacattactacgcaatgcggaatattgttcgttcatattaccccagacaccccatcttatcgtttgatagccctgtatccttcacgtcgcattggcgcgaatatgctcgggctttgcttttcgtcgtcttttataaagccacgtaaaagcggtgacgtcaaatgctgcgaaatcgcttcagcaaacgaataaatagcaggaatttacgtcattaaattcacgacgctttaaataagcgtaacttatggaaatgttaaaaaatcgccccaagtaacaccaaaggtgtaggtcggataagatgcgcaagtatcgcatccgacattattgcggcactggagtttggcaacagtgccggatgcggcgcgagcgccttatccggcctacagttgggcatcgtttgagtcactgtcggtcggataagatgcgcaagtatcgcatccgacattattgcggcactggagtttggcaacagtgccggatgcggcgcgagcgccttatccggcctacggttgggcatcgtttgagtcactgtaggtcggataagatgcgcaagcatcgcatccgacattattgcggcactggagtttggcaacagcgccggatgcggcgcgagcgccttatccggcctacgttttaatgccagcaaaaatggtgaattacctgggttatcagttcgcgggtgggcttgataaaccgtgtttccagatattcatcaggttgatgagcctgattaatactgccaggccccaacaccagcgtcgggcataacgtttgaataaacggcgcttcggtacagtagttcaccacttcggtttttgctccgagcaatttctcaaccacttcaaccagttgatgattcggtgggcattcatagccagggatcggcggatgcagctcgtcgaccgtcagacgacccggccagcgttcgctcaccggagccaatgcatcgttgagcaaaccattaagttcattgagtgtcatgccaggcagcggacgaatatccatatgcaactcacagcaagcgcaaatacggttagaagcgtcgccaccgtgaatatgcccgaggttgagcgtagggtatggcacggtaaacgcttcgtagtgataacgttctttcaggttatcgcgcaattgcaaaatatgcccgatggcgtcgtgcattagttcgatagcgttaactccgcgtgctggatcgctggagtgcccgctctggccctgaatacggatggcgttagagatatgacctttatgtgcgcgtaccggttgtagactcgtcggttcgccaatgatggcgcaatccgggcgcagggcggtagtttcggcaaaataacgcgctccggccatactggtttcttcatcagcagtcgccagaatgtagagcggttttttcagtttcgtgacgtcgacatcgcgtagcgcatcaaggataaacgcaaaaaagcctttcatgtcggcggtgcctaagccgtaaagcttgccgtcatgctccgtcagtgtaaacggatcgcgcgtccagcgaccgtcatcaaatggcaccgtatcggtatgccccgccagcaacaagccgccagccccctgtccgatacttgccagcatattgaatttgttgcgagttcctggaacaggctgcacttccacattgaagcccaaatctttaaaccagtccgccagcagagtgattaaatctgcattgctttgatcgagtgcctcttccgtggcgcttatactaggtgtggcaatcagagcgcggtaaatctcgataaatggcggtaatttgtttttcattgttgacacacctctggtcatgatagtatcaatattcatgcagtatttatgaataaaaatacactaacgttgagcgtaataaaacccaccagccgtaaggtgaatgttttacgtttaacctggcaaccagacataagaaggtgaatagccccgatgttgaatacgctgattgtgggtgccagcggctacgctggcgcagagctagtgacctatgtaaatcgccatccgcatatgaacataaccgctttgactgttagtgcgcaaagcaatgatgcgggaaagttaatctccgatttgcatccgcagctaaaaggcatcgttgatctgccgttgcagccgatgagcgatatcagcgagtttagcccaggggtggacgtagtgtttctcgccaccgcccatgaagttagccacgatttagcgccgcagtttcttgaagcgggctgcgtggtgttcgacctttccggcgcgtttcgtgttaacgacgccaccttctatgaaaaatattacggctttacccatcaatacccggaactgttggaacaggcagcctacggtctggcggagtggtgcggtaataaattaaaagaagcgaatttgattgcggtgccgggctgttatccgacggcggcacagctggcgctgaaaccgttgattgatgccgatcttcttgacctcaatcagtggccggtgatcaacgccaccagcggcgtgagcggtgcagggcgtaaagcggccattagtaacagcttttgtgaagttagcctgcaaccgtatggcgtctttactcatcgccatcaaccagagatcgccacacacctcggtgctgacgttatcttcaccccacatctgggcaatttcccgcgcggcattctcgaaaccattacctgccgcctgaaaagcggtgtgacccaggcgcaagtcgcgcaagtgttacagcaggcgtatgcccataaaccgctggtgcggctgtatgacaaaggcgttccggcgctgaaaaatgtcgttgggctgccattttgcgatatcgggtttgccgttcagggcgagcatctgattattgtggcgaccgaagacaacttactgaaaggcgcggcggcacaagcggtacagtgcgccaatattcgtttcggctatgcggaaacgcagtctcttatttaagggtgcaatgatgaatccattaattatcaaactgggcggcgtactgctggatagtgaagaggcgctggaacgtctgtttagcgcactggtgaattatcgtgagagtcatcagcgtccgctggtgattgtgcacggcggcggttgcgtggtggatgagctgatgaaagggctgaatctgccggtgaaaaagaaaaacggcctgcgggtgacgcctgctgatcagatagacattatcaccggagcactggcgggaacggcaaataaaaccctgttggcatgggcgaagaaacatcagattgcggccgtaggtttgtttctcggtgacggcgacagcgtcaaagtgacccagcttgatgaagagttaggtcatgttggactggcgcagccaggtagccctaagcttatcaactccttgctggagaacggttatctgccggtggtcagctccattggcgtaacagacgaagggcaactgatgaacgtcaatgccgaccaggcggcaacggcgctggcggcaacgctgggcgcggatctgattttgctctccgacgtcagcggcattctcgacggcaaagggcaacgcattgccgaaatgaccgccgcgaaagcagaacaactgattgagcagggcattattactgacggcatgatagtgaaagtgaacgcggcgctggatgcggcccgcacgctgggccgtccggtagatatcgcctcctggcgtcatgcggagcagcttccggcactgtttaacggtatgccgatgggtacgcggattttagcttaagttttgttggccggaggcgcagctttccggcattgaatttcaaaataaggaaacagagttatggcactttggggcgggcgttttacccaggcagcagatcaacggttcaaacaattcaacgacagtctgcgctttgattaccgtctggcggagcaggatattgttggctctgtggcctggtccaaagccctggtcacggtaggcgtgttaaccgcagaagagcaggcgcaactggaagaggcgctgaacgtgttgctggaagatgttcgcgccaggccacaacaaatccttgaaagcgacgccgaagatatccatagctgggtggaaggcaaactgatcgacaaagtgggccagttaggcaaaaagctgcataccgggcgtagccgtaatgatcaggtagcgactgacctgaaactgtggtgcaaagataccgttagcgagttactgacggctaaccggcagctgcaaagcgcgctggtggaaaccgcacaaaacaatcaggacgcggtaatgccaggttacactcacctgcaacgcgcccagccggtgacgttcgcgcactggtgcctggcctatgttgagatgctggcgcgtgatgaaagccgtttgcaggatgcgcttaagcgtctggatgtcagcccgctaggctgtggcgcgctggcgggaacggcctatgaaatcgaccgtgaacagttagcaggctggctgggctttgctagcgcgacccgtaacagtctcgacagcgtttctgaccgtgaccatgtgttggaactgctttctgctgccgctatcggcatggtgcatctgagccgttttgctgaagatctgattttctttaacaccggcgaagcggggtttgtggagctttctgaccgcgtgacttccggtagtagtttaatgccgcagaagaaaaacccggatgcgctggagctgattcgcggtaaatgcggccgggtgcagggggcgttaaccggcatgatgatgacgctgaaaggtttgccgctggcttacaacaaagatatgcaggaagacaaagaaggtctgttcgacgcgctcgatacctggctggactgcctgcatatggcggcgctggtgctggacggcattcaggtgaaacgtccacgttgccaggaagcggctcagcagggttacgccaacgccaccgaactggcggattatctggtggcgaaaggcgtaccgttccgcgaggcgcaccatattgttggtgaagcggtggtggaagccattcgtcagggcaaaccgctggaagatctgccgctcagtgagttgcagaaattcagtcaggtgattgacgaagatgtctatccgattctgagcctgcaaagctgcctcgacaagcgtgcggcaaaaggcggcgtcagtccgcagcaggtggcgcaggcgattgcttttgcgcaggctcggttagggtaagaacatttatatgtataaatttgagcctggcttatcgccgggcttttttatggcaaaaaaaagcggatcctggagatccgcaaaagttcacgttggctttagttattcgagttgagaaactctcgaaacgggcagtgacttcaagggttaaaagaggtgccgctccgtttctgtgagcaattatcagtcagaatgcttgatagggataatcgttcattgctattctacctatcgccatgaactatcgtggcgatggaggatggataatgaatattcgtgatcttgagtacctggtggcattggctgaacaccgccattttcggcgtgcggcagattcctgccacgttagccagccgacgcttagcgggcaaattcgtaagctggaagatgagctgggcgtgatgttgctggagcggaccagccgtaaagtgttgttcacccaggcgggaatgctgctggtggatcaggcgcgtaccgtgctgcgtgaggtgaaagtccttaaagagatggcaagccagcagggcgagacgatgtccggaccgctgcacattggtttgattcccacagttggaccgtacctgctaccgcatattatccctatgctgcaccagacctttccaaagctggaaatgtatctgcatgaagcacagacccaccagttactggcgcaactggacagcggcaaactcgattgcgtgatcctcgcgctggtgaaagagagcgaagcattcattgaagtgccgttgtttgatgagccaatgttgctggctatctatgaagatcacccgtgggcgaaccgcgaatgcgtaccgatggccgatctggcaggggaaaaactgctgatgctggaagatggtcactgtttgcgcgatcaggcaatgggtttctgttttgaagccggggcggatgaagatacacacttccgcgcgaccagcctggaaactctgcgcaacatggtggcggcaggtagcgggatcactttactgccagcgctggctgtgccgccggagcgcaaacgcgatggggttgtttatctgccgtgcattaagccggaaccacgccgcactattggcctggtttatcgtcctggcagtccgctgcgcagccgctatgagcagctggcagaggccatccgcgcaagaatggatggccatttcgataaagttttaaaacaggcggtttaaaccgtttaacgcagctacccgataggcttccgccatcgtcgggtagttaaaggtggtgttgacgaagtactcaatagtgttgccgccacctttctgttccataatcgcctgaccgatatgaataatttcggcagcgcgctcgccaaagcagtgaatacccagaatctcttttgtttcccgatggaacaaaattttcagcgtgcccacgttcatgccgacgatttgtgcgcgtgccagatgtttaaactgggcgcggcccacttcatatggcactttcattgcggtcagctgctgttcggttttgcccacagagctgatttccgggatggtgtaaataccggtagggatatcttcaatcagatgtgcggtggcttcgccttttaccagcgcctgcgcggcaatgcgcccctggtcataggccgcgctcgccaggctcggataaccaatcacgtcgcccaccgcgtaaacgtgtggctgtgcggtctgatacatgctgttgaccttcagctgtccgcggctgtcagtttctagcccaatgttctgtaacgccaggctatcggtattaccggtgcgaccgttggcatagagcaggcagtcagctttcagttttttaccgctcttcagatgcatgatcacaccatcgtcacagccttcgatcttctcgtactcttcgttgtgacgaatcactacgccactgttccagaagtgataggagagagaatcactcatctcttgatcgagaaatgccagcaggcgatcgcgggtgttgatcagatccacttttacatccataccgcggaagatgctcgcatattcacagccgatcactccagcaccatagataagtacatggcgcggttcgtggtgcatgctgagaatactgtcgctgtcgtaaatgcgtggatgggtgaaatcaacatctgttggatgatatggacgagagccgcaggcaataacaaatttttcagcggttagtgtttcaacgctgccgtccgggcaatccagcgccaacgtatgctcgtcaacaaagcgagcgtttccctgcaatatttcacagtgattacgttcgtaaaatccctgacgcatgcgcgtttgttgattaatcacgttatcggcatggttaaggatatcggcaaaagaagagcggagcagtcgggaatggtcgctgtaaagtgggttttgattgaattctataatgcggctgacggcgtgacggagagctttgctcgggatggtgccccagtgggtgcaaccgccgccaacattttgataacgctcgataactgcgacgcgcgcaccttgcttaaccaggcccattgcagcgccttcgccgccggggccggaacctattactatggcatcgtaatcgtaggaatgtggcatggtagggcttacctgttcttatacataaaagcaacagaatggtaacattttatcgcgggtaagccaattgatccccgtcatttatctggctatatcctgagcggcctttgctttgtctgtttcttacttttgccctgacgttttattggatttttatcgacgatactctccgtttaagcggcaggtttccgctgtacgtaaaagaaccggccaaagaattgcagtaaatatgttttattgcgttaccgttcattcacaatactggagcaatccagtatgttcattctctggtatagtgccagcagtacttttggcaaggatagtgacatcgtgatgggcgtaagagcgcaacaaaaagaaaaaacccgccgtagcctggtggaagccgcatttagccaattaagtgctgaacgcagcttcgccagcctgagtttgcgtgaagtggcgcgtgaagcgggcattgctcccacctctttttatcggcatttccgcgacgtagacgaactgggtctgaccatggttgatgagagcggtttaatgctacgccaactcatgcgccaggcgcgtcagcgtatcgccaaaggcgggagtgtgatccgcaccagcgtctccacatttatggagttcatcggtaataatcctaacgccttccggttattattgcgggaacgctccggcacctccgctgcgtttcgtgccgccgttgcgcgtgaaattcagcacttcattgcggaacttgcggactatctggaactcgaaaaccatatgccgcgtgcgtttactgaagcgcaagccgaagcaatggtgacaattgtcttcagtgcgggtgccgaggcgttggacgtcggcgtcgaacaacgtcggcaattagaagagcgactggtactgcaactgcgaatgattagcaaaggggcttattactggtatcgccgtgaacaagagaaaaccgcaattattccgggaaatgtgaaggacgagtaatgaaacaagcaaatcaagatagaggtacgctgctgctggcgttagttgctggcttaagcattaatggtactttcgcagcgctgtttagctccattgtgccattttctgtattcccgattatttccctggtgctgacggtttactgcctgcatcaacgttatcttaatcgcactatgccggtaggcttgccgggtctggcagctgcctgttttattctcggcgtactgctgtacagcacggtagttcgtgcggaatatccggatatcggctctaacttcttcccggcagtactctccgtcattatggtgttctggattggcgcgaagatgcgtaaccgtaagcaggaagttgctgagtaatcggtattatgccggatgctggcgcatccggcatgggttttacttcgcggtcagtaatacgccgcactccatatggtgcgtgtaggggaactgatcaaacagagccagacgttcgaccttgtgcgtctggcttaatgtttccagattcttgcataacgtttccgggttacaggagatgtacaaaatacgcggatacgcctgcaccattttctcggtttcactgtccagaccgctgcgcggagggtcgacaaaaatggtttcgcactgataactctttaagtcgatcccttgcaggcggttaaactcgcgcacaccattcatcgcctgagtaaattcttctgccgccatacgaataatttgtacgttatcaatatggttagctgcgatgttgtattgcgcagcagcaacgctcggcttagcgatttcggtggctaatacccgatcaaaattacgcgccagcgctaaactaaagttaccgttgccgcagtacagctccagtaaatcgcctttactgcctttggttacgtccagcgcccattccagcatctgaatattcatcgccgcgttcggctgggtaaagctgttttctacctgacggtagatcatctctttccctgcgaccggcagacgttcatcgatgtaatcctgatccagctcgattttggttttcgttgcccgaccaatcagatgcacattcagattctgcgcgcgcagtgcatcgcgcagggcctccgcttcctgacgccactcatcatccagcttcttatggtatagcagggaaaccaccgcctgattactcagtgtagtgaggtaatcaatctggaacaacttgtggcgcagaacgggattattacgcacacccgcaatcatcgccgtcatcaactggttgataagttcactggcggcggggaagctatccacgcggatgcggcttttggtttgttgatcgaaaatgatgtgatacaggtcatcgccatcgtgccagatgcggaactccgcgcgcatccggtaatgactgaccgggctgcgaaacacttccggaaccaggtcagaaaacggtgccatcatactttgcaaacgtaccactttttcggctaactgcgcttcatactgttctgttggaaggtgttcgggggtcatgatgtatcctgaaaaattaaagtacgcggcgattgtagggattgctcatcagatgtccagatcttgatgaattcctatttgtgagctacgtctggacagtaacttgttacaacctgtagcatccacttgccggtcctgtgagttaatagggaatccagtgcgaatctggagctgacgcgcagcggtaaggaaaggtgcgatgattgcgttatgcggacactgccattcggtgggaagtcatcatctcttagtatcttagatacccctccaagcccgaagacctgccggccaacgtcgcatctggttctcatcatcgcgtaatattgatgaaacctgcggcatccttcttctattgtggatgctttacaatgattaaaaaagctagcctgctgacggcgtgttccgtcacggcattttccgcttgggcacaggataccagcccggatactctcgtcgttactgctaaccgttttgaacagccgcgcagcactgtgcttgcaccaaccaccgttgtgacccgtcaggatatcgaccgctggcagagcaccagcgtcaatgatgtgctgcgccgtcttccgggcgtcgatatcacccaaaacggcggtagtggtcagctcagttctatttttattcgcggtacaaatgccagtcatgtgttggtgttaattgatggcgtacgcctgaatctggcgggggtgagtggttctgccgaccttagccagttccctattgcgcttgtccagcgtgttgaatatatccgtgggccgcgctccgctgtttatggttccgatgcaataggcggggtggtgaatatcatcacgacgcgcgatgaacccggaacggaaattagtgcagggtggggaagcaatagttatcagaactatgatgtctctacgcagcaacaactgggggataagacacgggtaacgctgttgggcgattatgcccatactcatggttatgatgttgttgcctatggtaataccggaacgcaagcgcagacagataacgatggttttttaagtaaaacgctttatggcgcgctggagcataactttactgatgcctggagcggctttgtgcgcggctatggctatgataaccgtaccaattatgacgcgtattattctcccggtagtccgttgctcgatacccgtaaactctatagccaaagttgggacgccgggctgcgctataacggcgaactgattaaaagtcaactcattaccagctatagccatagcaaagattacaactacgatccccattatggtcgttatgatagcagcgcgacgctcgatgagatgaagcaatacaccgtccagtgggcaaacaatgtcatcgttggtcacggtagtattggtgcgggtgtcgactggcagaaacagactacgacgccgggtacaggttatgttgaggatggatatgatcaacgtaataccggcatctatctgaccgggctgcaacaagtcggcgattttacctttgaaggcgcagcacgcagtgacgataacagtcagtttggtcgtcatggaacctggcaaaccagcgccggttgggaattcatcgaaggttatcgcttcattgcttcctacgggacatcttataaggcaccaaatctggggcaactgtatggcttctacggaaatccgaatctggacccggagaaaagcaaacagtgggaaggcgcgtttgaaggcttaaccgctggggtgaactggcgtatttccggatatcgtaacgatgtcagtgacttgatcgattatgatgatcacaccctgaaatattacaacgaagggaaagcgcggattaagggcgtcgaggcgaccgccaattttgataccggaccactgacgcatactgtgagttatgattatgtcgatgcgcgcaatgcgattaccgacacgccgttgttacgccgtgctaaacagcaggtgaaataccagctcgactggcagttgtatgacttcgactggggtattacttatcagtatttaggcactcgctatgataaggattacagttcttatccttatcaaaccgttaaaatgggcggtgtgagcttgtgggatcttgcggttgcgtatccggtcacctctcacctgacagttcgtggtaaaatagccaacctgttcgacaaagattatgagacagtctatggctaccaaactgcaggacgggaatacaccttgtctggcagctacaccttctgaaccacgtcccaccgtgctggtgtttgactccggcgtcggtgggttgagcgtctatgacgagatccggcatctcttaccggatctccattacatttatgctttcgataacgtcgctttcccgtatggcgaaaaaagcgaagcgtttattgttgagcgagtggtggcaattgtcaccgcggtgcaagaacgttatccccttgcgctggctgtggtcgcttgcaacactgccagtaccgttagtcttcctgcattacgcgaaaagttcgacttcccggttgttggtgtcgtgccggcgattaaacctgctgcacgtctgacggcaaatggcattgtcggattactggcaacccgcggaacagttaaacgttcttatactcatgagctgatcgcgcgtttcgctaatgaatgccagatagaaatgctgggcagcgcagagatggttgagttggctgaagcgaagctacatggcgaagatgtttctctggatgcactaaaacgtatcctacgcccgtggttaagaatgaaagagccgccagataccgttgtattgggttgcacccatttccctctactacaagaagaactgttacaagtgctgccagagggaacccggctggtggattctggcgcagcgattgctcgccgaacggcctggttgttagaacatgaagccccggatgcaaaatctgccgatgcgaatattgccttttgtatggcaatgacgccaggagctgaacaattattgcccgttttacagcgttacggcttcgaaacgctcgaaaaactggcagttttaggctgatttggttgaatgttgcgcggtcagaaaattattttaaatttcctcttgtcaggccggaataactccctataatgcgccaccactgacacggaacaacggcaaacacgccgccgggtcagcggggttctcctgagaactccggcagagaaagcaaaaataaatgcttgactctgtagcgggaaggcgtattatgcacaccccgcgccgctgagaaaaagcgaagcggcactgctctttaacaatttatcagacaatctgtgtgggcactcgaagatacggattcttaacgtcgcaagacgaaaaatgaataccaagtctcaagagtgaacacgtaattcattacgaagtttaattctttgagcgtcaaacttttaaattgaagagtttgatcatggctcagattgaacgctggcggcaggcctaacacatgcaagtcgaacggtaacaggaagaagcttgcttctttgctgacgagtggcggacgggtgagtaatgtctgggaaactgcctgatggagggggataactactggaaacggtagctaataccgcataacgtcgcaagaccaaagagggggaccttcgggcctcttgccatcggatgtgcccagatgggattagctagtaggtggggtaacggctcacctaggcgacgatccctagctggtctgagaggatgaccagccacactggaactgagacacggtccagactcctacgggaggcagcagtggggaatattgcacaatgggcgcaagcctgatgcagccatgccgcgtgtatgaagaaggccttcgggttgtaaagtactttcagcggggaggaagggagtaaagttaatacctttgctcattgacgttacccgcagaagaagcaccggctaactccgtgccagcagccgcggtaatacggagggtgcaagcgttaatcggaattactgggcgtaaagcgcacgcaggcggtttgttaagtcagatgtgaaatccccgggctcaacctgggaactgcatctgatactggcaagcttgagtctcgtagaggggggtagaattccaggtgtagcggtgaaatgcgtagagatctggaggaataccggtggcgaaggcggccccctggacgaagactgacgctcaggtgcgaaagcgtggggagcaaacaggattagataccctggtagtccacgccgtaaacgatgtcgacttggaggttgtgcccttgaggcgtggcttccggagctaacgcgttaagtcgaccgcctggggagtacggccgcaaggttaaaactcaaatgaattgacgggggcccgcacaagcggtggagcatgtggtttaattcgatgcaacgcgaagaaccttacctggtcttgacatccacggaagttttcagagatgagaatgtgccttcgggaaccgtgagacaggtgctgcatggctgtcgtcagctcgtgttgtgaaatgttgggttaagtcccgcaacgagcgcaacccttatcctttgttgccagcggtccggccgggaactcaaaggagactgccagtgataaactggaggaaggtggggatgacgtcaagtcatcatggcccttacgaccagggctacacacgtgctacaatggcgcatacaaagagaagcgacctcgcgagagcaagcggacctcataaagtgcgtcgtagtccggattggagtctgcaactcgactccatgaagtcggaatcgctagtaatcgtggatcagaatgccacggtgaatacgttcccgggccttgtacacaccgcccgtcacaccatgggagtgggttgcaaaagaagtaggtagcttaaccttcgggagggcgcttaccactttgtgattcatgactggggtgaagtcgtaacaaggtaaccgtaggggaacctgcggttggatcacctccttaccttaaagaagcgtactttgtagtgctcacacagattgtctgatagaaagtgaaaagcaaggcgtttacgcgttgggagtgaggctgaagagaataaggccgttcgctttctattaatgaaagctcaccctacacgaaaatatcacgcaacgcgtgataagcaattttcgtgtccccttcgtctagaggcccaggacaccgccctttcacggcggtaacaggggttcgaatcccctaggggacgccacttgctggtttgtgagtgaaagtcgccgaccttaatatctcaaaactcatcttcgggtgatgtttgagatatttgctctttaaaaatctggatcaagctgaaaattgaaacactgaacaacgagagttgttcgtgagtctctcaaattttcgcaacacgatgatgaatcgaaagaaacatcttcgggttgtgaggttaagcgactaagcgtacacggtggatgccctggcagtcagaggcgatgaaggacgtgctaatctgcgataagcgtcggtaaggtgatatgaaccgttataaccggcgatttccgaatggggaaacccagtgtgtttcgacacactatcattaactgaatccataggttaatgaggcgaaccgggggaactgaaacatctaagtaccccgaggaaaagaaatcaaccgagattcccccagtagcggcgagcgaacggggagcagcccagagcctgaatcagtgtgtgtgttagtggaagcgtctggaaaggcgcgcgatacagggtgacagccccgtacacaaaaatgcacatgctgtgagctcgatgagtagggcgggacacgtggtatcctgtctgaatatggggggaccatcctccaaggctaaatactcctgactgaccgatagtgaaccagtaccgtgagggaaaggcgaaaagaaccccggcgaggggagtgaaaaagaacctgaaaccgtgtacgtacaagcagtgggagcacgcttaggcgtgtgactgcgtaccttttgtataatgggtcagcgacttatattctgtagcaaggttaaccgaataggggagccgaagggaaaccgagtcttaactgggcgttaagttgcagggtatagacccgaaacccggtgatctagccatgggcaggttgaaggttgggtaacactaactggaggaccgaaccgactaatgttgaaaaattagcggatgacttgtggctgggggtgaaaggccaatcaaaccgggagatagctggttctccccgaaagctatttaggtagcgcctcgtgaattcatctccgggggtagagcactgtttcggcaagggggtcatcccgacttaccaacccgatgcaaactgcgaataccggagaatgttatcacgggagacacacggcgggtgctaacgtccgtcgtgaagagggaaacaacccagaccgccagctaaggtcccaaagtcatggttaagtgggaaacgatgtgggaaggcccagacagccaggatgttggcttagaagcagccatcatttaaagaaagcgtaatagctcactggtcgagtcggcctgcgcggaagatgtaacggggctaaaccatgcaccgaagctgcggcagcgacgcttatgcgttgttgggtaggggagcgttctgtaagcctgcgaaggtgtgctgtgaggcatgctggaggtatcagaagtgcgaatgctgacataagtaacgataaagcgggtgaaaagcccgctcgccggaagaccaagggttcctgtccaacgttaatcggggcagggtgagtcgacccctaaggcgaggccgaaaggcgtagtcgatgggaaacaggttaatattcctgtacttggtgttactgcgaaggggggacggagaaggctatgttggccgggcgacggttgtcccggtttaagcgtgtaggctggttttccaggcaaatccggaaaatcaaggctgaggcgtgatgacgaggcactacggtgctgaagcaacaaatgccctgcttccaggaaaagcctctaagcatcaggtaacatcaaatcgtaccccaaaccgacacaggtggtcaggtagagaataccaaggcgcttgagagaactcgggtgaaggaactaggcaaaatggtgccgtaacttcgggagaaggcacgctgatatgtaggtgaggtccctcgcggatggagctgaaatcagtcgaagataccagctggctgcaactgtttattaaaaacacagcactgtgcaaacacgaaagtggacgtatacggtgtgacgcctgcccggtgccggaaggttaattgatggggttagcgcaagcgaagctcttgatcgaagccccggtaaacggcggccgtaactataacggtcctaaggtagcgaaattccttgtcgggtaagttccgacctgcacgaatggcgtaatgatggccaggctgtctccacccgagactcagtgaaattgaactcgctgtgaagatgcagtgtacccgcggcaagacggaaagaccccgtgaacctttactatagcttgacactgaacattgagccttgatgtgtaggataggtgggaggctttgaagtgtggacgccagtctgcatggagccgaccttgaaataccaccctttaatgtttgatgttctaacgttgacccgtaatccgggttgcggacagtgtctggtgggtagtttgactggggcggtctcctcctaaagagtaacggaggagcacgaaggttggctaatcctggtcggacatcaggaggttagtgcaatggcataagccagcttgactgcgagcgtgacggcgcgagcaggtgcgaaagcaggtcatagtgatccggtggttctgaatggaagggccatcgctcaacggataaaaggtactccggggataacaggctgataccgcccaagagttcatatcgacggcggtgtttggcacctcgatgtcggctcatcacatcctggggctgaagtaggtcccaagggtatggctgttcgccatttaaagtggtacgcgagctgggtttagaacgtcgtgagacagttcggtccctatctgccgtgggcgctggagaactgaggggggctgctcctagtacgagaggaccggagtggacgcatcactggtgttcgggttgtcatgccaatggcactgcccggtagctaaatgcggaagagataagtgctgaaagcatctaagcacgaaacttgccccgagatgagttctccctgaccctttaagggtcctgaaggaacgttgaagacgacgacgttgataggccgggtgtgtaagcgcagcgatgcgttgagctaaccggtactaatgaaccgtgaggcttaaccttacaacgccgaagctgttttggcggatgagagaagattttcagcctgatacagattaaatcagaacgcagaagcggtctgataaaacagaatttgcctggcggcagtagcgcggtggtcccacctgaccccatgccgaactcagaagtgaaacgccgtagcgccgatggtagtgtggggtctccccatgcgagagtagggaactgccaggcatcaaataaaacgaaaggctcagtcgaaagactgggcctttcgttttatctgttgtttgtcggtgaacgctctcctgagtaggacaaatccgccgggagcggatttgaacgttgcgaagcaacggcccggagggtggcgggcaggacgcccgccataaactgccaggcatcaaattaagcagaaggccatcctgacggatggcctttttgcgtttctacaaactcttcctgtcgtcatatctacaagccatccccccacagatacggtaaactagcctcgtttttgcatcaggaaagcagctatgaaccactccttaaaaccctggaacacatttggcattgatcataatgctcagcacattgtatgtgccgaagacgaacaacaattactcaatgcctggcagtatgcaaccgcagaaggacaacccgttcttattctgggtgaaggaagtaatgtactttttctggaggactatcgcggcacggtgatcatcaaccggatcaaaggtatcgaaattcatgatgaacctgatgcgtggtatttacatgtaggagccggagaaaactggcatcgtctggtaaaatacactttgcaggaaggtatgcctggtctggaaaatctggcattaattcctggttgtgtcggcagtagtcctatccagaatattggtgcttatggcgtagaattacagcgagtttgcgcttatgttgattctgttgaactggcgacaggcaagcaagtgcgcttaactgccaaagagtgccgttttggctatcgcgacagtatttttaaacatgaataccaggaccgcttcgctattgtagccgtaggtctgcgtctgccaaaagagtggcaacctgtactaacgtatggtgacttaactcgtctggatcctacaacagtaacgccacagcaagtatttaatgcggtgtgtcatatgcgcaccaccaaactccctgatccaaaagtgaatggcaatgccggtagtttcttcaaaaaccctgttgtatctgccgaaacggctaaagcattactgagtcaatttccaacagcaccaaattacccccaggcggatggtagtgtaaaactggcagcaggttggcttatcgatcagtgccagctaaaagggatgcaaataggtggggctgcggtgcaccgtcaacaggcgttagttctcattaatgaagacaatgcaaaaagcgaagatgttgtacagctggcgcatcatgtaagacagaaagttggtgaaaaatttaatgtctggcttgagcctgaagtccgctttattggtgcaagtggtgaagtgagcgcagtggagacaattagttgaaataaagcgcagtggagacaatttcatgaaggataacaccgtgccactgaaattgattgccctgttagcgaacggtgaatttcactctggcgagcagttgggtgaaacgctgggaatgagccgggcggctattaataaacacattcagacactgcgtgactggggcgttgatgtctttaccgttccgggtaaaggatacagcctgcctgagcctatccagttacttaatgctaaacagatattgggtcagctggatggcggtagtgtagccgtgctgccagtgattgactccacgaatcagtaccttcttgatcgtatcggagagcttaaaagcggcgatgcttgcattgcagaataccagcaggctggccgtggtcgccggggtcggaaatggtttagcccttttggcgcaaacttatatttgagcatgttctggcgtctggaacaaggcccggcggcggcgattggtttaagtctggttatcggtatcgtgatggcggaagtattacgcaagctgggtgcagataaagttcgtgttaaatggcctaatgacctctatctgcaggatcgcaagctggcaggcattctggtggagctgactggcaaaactggcgatgcggcgcaaatagtcattggagccgggatcaacatggcaatgcgccgtgttgaagagagtgtcgttaatcaggggtggatcacgctgcaggaagcggggatcaatctcgatcgtaatacgttggcggccatgctaatacgtgaattacgtgctgcgttggaactcttcgaacaagaaggattggcaccttatctgagccgctgggaaaagctggataattttattaatcgcccagtgaaacttatcattggtgataaagaaatatttggcattagtcgcggaatagacaaacagggggctttattacttgagcaggatggaataataaaaccctggatgggcggtgaaatatccctgcgtagtgcagaaaaataagaaaggggagtattcgctcccctgcaaattatttgcgtagtctgacctcttctaccgcatgattagcacttttcgtcaggattaaactggcgcgctcacgagtaggtagaatattttgctttaagttcagccagttgatctctttccacaatgtcatggcagtcttaatcgcttcttctttagttaatttcgcgtagttatgaaaataggaatccgggtcggtaaaagccccttcgcggaatttcagaaaacggttgatataccatgtctgaagtaagtcttccggtgcatcaacatatatgctaaaatcgacaaaatcagaaacaaatacatgatgtggatcgtgtggataatccatcccgctctgtaagacatttaacccttcaagaattaaaatatcaggctgaacaaccgttttatctccatccgggatcacatcataaataagatgactgtaaacaggtgctgtaacgtttggcacgccggatttgagatcggaaacaaacttcaccaggcgatgcatatcatagctttccgggaagcctttcttcttcatcagaccacgttctttcagaacctgattagggtgaaggaagccatctgtagtgatcagttcaacacgacgatgttccggccaacggcttaatagcgcctgcaatacacgggcggttgtacttttccccaccgcgacactgccagcaatactgataatgtaaggaatgcgttgcccgttggtaccaagaaactgttccagaactgcctgacggcgcagattgctgcttatatagaagttcagcaaacgactcaaaggtaaatagatctcggcaacttcttctaagctgagatcttcattaatacctttgagacgggcgatctcatcttcgcttaacgtcataggtacggaatcacgcagagctgcccactggttgcggtcaaactgtaggtaaggcgtcattaacgtttgctcttttatactcataagcatgtttctggcggtcatagctctatcggcaaagcgatatttgccatggcgcgtcacagttctgttgaatgggttaatgggcaggagggtaacaccagatggggaggaataataagaaaaaatctctgccaggaagctatcgttgaaaagcaatgtgacagatattccatctgataaaaagaattatggtttagcaggagcgcattgttgagcacaatgatgttgaaaaagtgtgctaatctgccctccgttcggctgtttcttcatcgtgtcgcataaaatgtgaccaataaaacaaattatgcaattttttagttgcatgaactcgcatgtctccatagaatgcgcgctacttgatgccgacttagctcagtaggtagagcaactgacttgtaatcagtaggtcaccagttcgattccggtagtcggcaccatcaagtccggtggggttcccgagcggccaaagggagcagactgtaaatctgccgtcacagacttcgaaggttcgaatccttcccccaccaccaatttcggccacgcgatggcgtagcccgagacgataagttcgcttaccggctcgaataaagagagcttctctcgatattcagtgcagaatgaaaatcaggtagccgagttccaggatgcgggcatcgtataatggctattacctcagccttccaagctgatgatgcgggttcgattcccgctgcccgctccaagatgtgctgatatagctcagttggtagagcgcacccttggtaagggtgaggtcggcagttcgaatctgcctatcagcaccacttcttttctcctccctgttttttccttctgtttattgcattcaacaagtcgggcatgttgcctggttgatgtggtgatatcaccgatttatccgtgtcttagagggacaatcgatgtctaaagaaaagtttgaacgtacaaaaccgcacgttaacgtcggtactatcggccacgttgaccatggtaaaacaacgctgaccgctgcaatcactaccgtactggctaaaacctacggcggtgctgctcgcgcattcgaccagatcgataacgcgccggaagaaaaagctcgtggtatcaccatcaacacttctcacgttgaatacgacaccccgacccgtcactacgcacacgtagactgcccggggcacgccgactatgttaaaaacatgatcaccggtgctgcgcagatggacggcgcgatcctggtagttgctgcgactgacggcccgatgccgcagactcgtgagcacatcctgctgggtcgtcaggtaggcgttccgtacatcatcgtgttcctgaacaaatgcgacatggttgatgacgaagagctgctggaactggttgaaatggaagttcgtgaacttctgtctcagtacgacttcccgggcgacgacactccgatcgttcgtggttctgctctgaaagcgctggaaggcgacgcagagtgggaagcgaaaatcctggaactggctggcttcctggattcttacattccggaaccagagcgtgcgattgacaagccgttcctgctgccgatcgaagacgtattctccatctccggtcgtggtaccgttgttaccggtcgtgtagaacgcggtatcatcaaagttggtgaagaagttgaaatcgttggtatcaaagagactcagaagtctacctgtactggcgttgaaatgttccgcaaactgctggacgaaggccgtgctggtgagaacgtaggtgttctgctgcgtggtatcaaacgtgaagaaatcgaacgtggtcaggtactggctaagccgggcaccatcaagccgcacaccaagttcgaatctgaagtgtacattctgtccaaagatgaaggcggccgtcatactccgttcttcaaaggctaccgtccgcagttctacttccgtactactgacgtgactggtaccatcgaactgccggaaggcgtagagatggtaatgccgggcgacaacatcaaaatggttgttaccctgatccacccgatcgcgatggacgacggtctgcgtttcgcaatccgtgaaggcggccgtaccgttggcgcgggcgttgtagcaaaagttctgagctaattgccgataacatttgacgcaatgcgcactaaaagggcatcatttgatgccctttttgcacgctttcgtaccagaacctggctcatcagtgattttctttgtcataatcattgctgagacaggctctgttgagggcgtataatccgaaaagctaatacgcgtttcgatttggtttgcctcgcgatcgcggggtgaaaatgtttgtagaaaacttctgacaggttggtttatgagtgcgaataccgaagctcaaggaagcgggcgcggcctggaagcgatgaagtgggtcgttgtggtggcattgctcctggtggcgattgtcggcaactatctttatcgcgacattatgctgccgctgcgtgcgctggccgtagtaattctgattgctgcagcgggtggtgtcgcgctgttaacgacaaaaggtaaagctaccgttgcttttgcccgtgaagcgcgtaccgaagtccgtaaggtcatttggccgactcgccaggaaacattgcacaccacgctgattgtggctgcggttaccgcagtaatgagtctgatcctgtggggactggatggtattctggttcgcctggtatcctttatcactggcctgaggttctgagatgtctgaagctcctaaaaagcgctggtacgtcgttcaggcgttttccggttttgaaggccgcgtagcaacgagcctgcgtgagcatatcaaattacacaacatggaagatttgtttggtgaagtcatggtaccaaccgaagaagtggttgaaatccgtggcggtcagcgtcgcaaaagcgaacgtaaattcttccctggctacgtcctcgttcagatggtgatgaacgacgcgagctggcacctggtgcgcagcgtaccgcgtgtgatgggcttcatcggcggtacttccgatcgtcctgcgccaatcagcgataaagaagtcgatgcgattatgaaccgcctgcagcaggttggtgataagccgcgtccgaaaacgctgtttgaaccgggtgaaatggtccgtgttaatgatggtccgttcgctgacttcaacggtgttgttgaagaagtggattacgagaaatctcgtctgaaagtgtctgtttctatcttcggtcgtgcgaccccggtagagctggacttcagccaggttgaaaaagcctaacccagcgatcaaaaaagcggcgatttaatcgttgcacaaggcgtgagattggaatacaatttcgcgccttttgtttttatgggccttgcccgtaaaacgattttttatatcacggggagcctctcagaggcgttattacccaacttgaggaatttataatggctaagaaagtacaagcctatgtcaagctgcaggttgcagctggtatggctaacccgagtccgccagtaggtccggctctgggtcagcagggcgtaaacatcatggaattctgcaaagcgttcaacgcaaaaactgattccatcgaaaaaggtctgccgattccggtagtaatcaccgtttacgctgaccgttctttcactttcgttaccaagaccccgccggcagcagttctgctgaaaaaagcggctggtatcaagtctggttccggtaagccgaacaaagacaaagtgggtaaaatttcccgcgctcagctgcaggaaatcgcgcagaccaaagctgccgacatgactggtgccgacattgaagcgatgactcgctccatcgaaggtactgcacgttccatgggcctggtagtggaggactaagaaatggctaaactgaccaagcgcatgcgtgttatccgcgagaaagttgatgcaaccaaacagtacgacatcaacgaagctatcgcactgctgaaagagctggcgactgctaaattcgtagaaagcgtggacgtagctgttaacctcggcatcgacgctcgtaaatctgaccagaacgtacgtggtgcaactgtactgccgcacggtactggccgttccgttcgcgtagccgtatttacccaaggtgcaaacgctgaagctgctaaagctgcaggcgcagaactggtaggtatggaagatctggctgaccagatcaagaaaggcgaaatgaactttgacgttgttattgcttctccggatgcaatgcgcgttgttggccagctgggccaggttctgggtccgcgcggcctgatgccaaacccgaaagtgggtactgtaacaccgaacgttgctgaagcggttaaaaacgctaaagctggccaggttcgttaccgtaacgacaaaaacggcatcatccacaccaccatcggtaaagtggactttgacgctgacaaactgaaagaaaacctggaagctctgctggttgcgctgaaaaaagcaaaaccgactcaggcgaaaggcgtgtacatcaagaaagttagcatctccaccaccatgggtgcaggtgttgcagttgaccaggctggcctgagcgcttctgtaaactaatgcctttacgtgggcggtgattttgtctacaatcttacccccacgtataatgcttaatgcagacgtatatccgagatattcgggttgtggcaaggcggcaactgagtgagtcgccaggagcatagctaactatgtgactggtgcgaatgaaggaagccaacgccgtcacaagctgaatagcgacggatagaaaagatttgttcgttggagcctggcctatccaggcctccgtcgaagaccgcaggagtttcgcaagaaacttaatcccctgcgtagacggtgacagaacgctaagattattcttttatattctggcttgtttctgctcaccgtaattaagacgctctctccgtttggaggagtgaagtgagttccagagattttctctggcaaacatccaggagcaaagctaatggctttaaatcttcaagacaaacaagcgattgttgctgaagtcagcgaagtagccaaaggcgcgctgtctgcagtagttgcggattcccgtggcgtaactgtagataaaatgactgaactgcgtaaagcaggtcgcgaagctggcgtatacatgcgtgttgttcgtaacaccctgctgcgccgtgctgttgaaggtactccgttcgagtgcctgaaagacgcgtttgttggtccgaccctgattgcatactctatggaacacccgggcgctgctgctcgtctgttcaaagagttcgcgaaagcgaatgcaaaatttgaggtcaaagccgctgcctttgaaggtgagctgatcccggcgtctcagatcgaccgcctggcaactctgccgacctacgaagaagcaattgcacgcctgatggcaaccatgaaagaagctagcgctggcaaactggttcgtactctggctgctgtacgcgatgcgaaagaagctgcttaatcgcagttatctttttaacgcattcgcttacgtataaacttattctgatattcaggaacaatttaaatgtctatcactaaagatcaaatcattgaagcagttgcagctatgtctgtaatggacgttgtagaactgatctctgcaatggaagaaaaattcggtgtttccgctgctgctgctgtagctgtagctgctggcccggttgaagctgctgaagaaaaaactgaattcgacgtaattctgaaagctgctggcgctaacaaagttgctgttatcaaagcagtacgtggcgcaactggcctgggtctgaaagaagctaaagacctggtagaatctgcaccggctgctctgaaagaaggcgtgagcaaagacgacgcagaagcactgaaaaaagctctggaagaagctggcgctgaagttgaagttaaataagccaacccttccggttgcagcctgagaaatcaggctgatggctggtgactttttagtcaccagcctttttgcgctgtaaggcgccagtagcgtttcacactgtttgactactgctgtgcctttcaatgcttgtttctatcgacgacttaatatactgcgacaggacgtccgttctgtgtaaatcgcaatgaaatggtttaagcgtgatagcaacaggcattgcggaaagtgttccattttccggtcaacaaaatagtgttgcacaaactgtccgctcaatggacagatgggtcgacttgtcagcgagctgaggaaccctatggtttactcctataccgagaaaaaacgtattcgtaaggattttggtaaacgtccacaagttctggatgtaccttatctcctttctatccagcttgacagctttcagaaatttatcgagcaagatcctgaagggcagtatggtctggaagctgctttccgttccgtattcccgattcagagctacagcggtaattccgagctgcaatacgtcagctaccgccttggcgaaccggtgtttgacgtccaggaatgtcaaatccgtggcgtgacctattccgcaccgctgcgcgttaaactgcgtctggtgatctatgagcgcgaagcgccggaaggcaccgtaaaagacattaaagaacaagaagtctacatgggcgaaattccgctcatgacagacaacggtacctttgttatcaacggtactgagcgtgttatcgtttcccagctgcaccgtagtccgggcgtcttctttgactccgacaaaggtaaaacccactctagcggtaaagtgctgtataacgcgcgtatcatcccttaccgtggttcctggctggacttcgaattcgatccgaaggacaacctgttcgtacgtatcgaccgtcgccgtaaactgcctgcgaccatcattctgcgcgccctgaactacaccacagagcagatcctcgacctgttctttgaaaaagttatctttgaaatccgtgataacaagctgcagatggaactggtgccggaacgcctgcgtggtgaaaccgcatcttttgacatcgaagctaacggtaaagtgtacgtagaaaaaggccgccgtatcactgcgcgccacattcgccagctggaaaaagacgacgtcaaactgatcgaagtcccggttgagtacatcgcaggtaaagtggttgctaaagactatattgatgagtctaccggcgagctgatctgcgcagcgaacatggagctgagcctggatctgctggctaagctgagccagtctggtcacaagcgtatcgaaacgctgttcaccaacgatctggatcacggcccatatatctctgaaaccttacgtgtcgacccaactaacgaccgtctgagcgcactggtagaaatctaccgcatgatgcgccctggcgagccgccgactcgtgaagcagctgaaagcctgttcgagaacctgttcttctccgaagaccgttatgacttgtctgcggttggtcgtatgaagttcaaccgttctctgctgcgcgaagaaatcgaaggttccggtatcctgagcaaagacgacatcattgatgttatgaaaaagctcatcgatatccgtaacggtaaaggcgaagtcgatgatatcgaccacctcggcaaccgtcgtatccgttccgttggcgaaatggcggaaaaccagttccgcgttggcctggtacgtgtagagcgtgcggtgaaagagcgtctgtctctgggcgatctggataccctgatgccacaggatatgatcaacgccaagccgatttccgcagcagtgaaagagttcttcggttccagccagctgtctcagtttatggaccagaacaacccgctgtctgagattacgcacaaacgtcgtatctccgcactcggcccaggcggtctgacccgtgaacgtgcaggcttcgaagttcgagacgtacacccgactcactacggtcgcgtatgtccaatcgaaacccctgaaggtccgaacatcggtctgatcaactctctgtccgtgtacgcacagactaacgaatacggcttccttgagactccgtatcgtaaagtgaccgacggtgttgtaactgacgaaattcactacctgtctgctatcgaagaaggcaactacgttatcgcccaggcgaactccaacttggatgaagaaggccacttcgtagaagacctggtaacttgccgtagcaaaggcgaatccagcttgttcagccgcgaccaggttgactacatggacgtatccacccagcaggtggtatccgtcggtgcgtccctgatcccgttcctggaacacgatgacgccaaccgtgcattgatgggtgcgaacatgcaacgtcaggccgttccgactctgcgcgctgataagccgctggttggtactggtatggaacgtgctgttgccgttgactccggtgtaactgcggtagctaaacgtggtggtgtcgttcagtacgtggatgcttcccgtatcgttatcaaagttaacgaagacgagatgtatccgggtgaagcaggtatcgacatctacaacctgaccaaatacacccgttctaaccagaacacctgtatcaaccagatgccgtgtgtgtctctgggtgaaccggttgaacgtggcgacgtgctggcagacggtccgtccaccgacctcggtgaactggcgcttggtcagaacatgcgcgtagcgttcatgccgtggaatggttacaacttcgaagactccatcctcgtatccgagcgtgttgttcaggaagaccgtttcaccaccatccacattcaggaactggcgtgtgtgtcccgtgacaccaagctgggtccggaagagatcaccgctgacatcccgaacgtgggtgaagctgcgctctccaaactggatgaatccggtatcgtttacattggtgcggaagtgaccggtggcgacattctggttggtaaggtaacgccgaaaggtgaaactcagctgaccccagaagaaaaactgctgcgtgcgatcttcggtgagaaagcctctgacgttaaagactcttctctgcgcgtaccaaacggtgtatccggtacggttatcgacgttcaggtctttactcgcgatggcgtagaaaaagacaaacgtgcgctggaaatcgaagaaatgcagctcaaacaggcgaagaaagacctgtctgaagaactgcagatcctcgaagcgggtctgttcagccgtatccgtgctgtgctggtagccggtggcgttgaagctgagaagctcgacaaactgccgcgcgatcgctggctggagctgggcctgacagacgaagagaaacaaaatcagctggaacagctggctgagcagtatgacgaactgaaacacgagttcgagaagaaactcgaagcgaaacgccgcaaaatcacccagggcgacgatctggcaccgggcgtgctgaagattgttaaggtatatctggcggttaaacgccgtatccagcctggtgacaagatggcaggtcgtcacggtaacaagggtgtaatttctaagatcaacccgatcgaagatatgccttacgatgaaaacggtacgccggtagacatcgtactgaacccgctgggcgtaccgtctcgtatgaacatcggtcagatcctcgaaacccacctgggtatggctgcgaaaggtatcggcgacaagatcaacgccatgctgaaacagcagcaagaagtcgcgaaactgcgcgaattcatccagcgtgcgtacgatctgggcgctgacgttcgtcagaaagttgacctgagtaccttcagcgatgaagaagttatgcgtctggctgaaaacctgcgcaaaggtatgccaatcgcaacgccggtgttcgacggtgcgaaagaagcagaaattaaagagctgctgaaacttggcgacctgccgacttccggtcagatccgcctgtacgatggtcgcactggtgaacagttcgagcgtccggtaaccgttggttacatgtacatgctgaaactgaaccacctggtcgacgacaagatgcacgcgcgttccaccggttcttacagcctggttactcagcagccgctgggtggtaaggcacagttcggtggtcagcgtttcggggagatggaagtgtgggcgctggaagcatacggcgcagcatacaccctgcaggaaatgctcaccgttaagtctgatgacgtgaacggtcgtaccaagatgtataaaaacatcgtggacggcaaccatcagatggagccgggcatgccagaatccttcaacgtattgttgaaagagattcgtagcctgggtatcaacatcgaactggaagacgagtaattctcgctcaaacaggtcactgctgtcgggttaaaacccggcagcggattgtgctaactccgacgggagcaaatccgtgaaagatttattaaagtttctgaaagcgcagactaaaaccgaagagtttgatgcgatcaaaattgctctggctagcccagacatgatccgtagttggtctttcggtgaagttaaaaagccggaaaccatcaactaccgtacgttcaaaccagaacgtgacggccttttctgcgcccgtatctttgggccggtaaaagattacgagtgcctgtgcggtaagtacaagcgcctgaaacaccgtggcgtcatctgtgagaagtgcggcgttgaagtgacccagactaaagtacgccgtgagcgtatgggccacatcgaactggcttccccgactgcgcacatctggttcctgaaaagcctgccgtcccgtatcggtctgctgctcgatatgccgctgcgcgatatcgaacgcgtactgtactttgaatcctatgtggttatcgaaggcggtatgaccaacctggaacgtcagcagatcctgactgaagagcagtatctggacgcgctggaagagttcggtgacgaattcgacgcgaagatgggggcggaagcaatccaggctctgctgaagagcatggatctggagcaagagtgcgaacagctgcgtgaagagctgaacgaaaccaactccgaaaccaagcgtaaaaagctgaccaagcgtatcaaactgctggaagcgttcgttcagtctggtaacaaaccagagtggatgatcctgaccgttctgccggtactgccgccagatctgcgtccgctggttccgctggatggtggtcgtttcgcgacttctgacctgaacgatctgtatcgtcgcgtcattaaccgtaacaaccgtctgaaacgtctgctggatctggctgcgccggacatcatcgtacgtaacgaaaaacgtatgctgcaggaagcggtagacgccctgctggataacggtcgtcgcggtcgtgcgatcaccggttctaacaagcgtcctctgaaatctttggccgacatgatcaaaggtaaacagggtcgtttccgtcagaacctgctcggtaagcgtgttgactactccggtcgttctgtaatcaccgtaggtccatacctgcgtctgcatcagtgcggtctgccgaagaaaatggcactggagctgttcaaaccgttcatctacggcaagctggaactgcgtggtcttgctaccaccattaaagctgcgaagaaaatggttgagcgcgaagaagctgtcgtttgggatatcctggacgaagttatccgcgaacacccggtactgctgaaccgtgcaccgactctgcaccgtctgggtatccaggcatttgaaccggtactgatcgaaggtaaagctatccagctgcacccgctggtttgtgcggcatataacgccgacttcgatggtgaccagatggctgttcacgtaccgctgacgctggaagcccagctggaagcgcgtgcgctgatgatgtctaccaacaacatcctgtccccggcgaacggcgaaccaatcatcgttccgtctcaggacgttgtactgggtctgtactacatgacccgtgactgtgttaacgccaaaggcgaaggcatggtgctgactggcccgaaagaagcagaacgtctgtatcgctctggtctggcttctctgcatgcgcgcgttaaagtgcgtatcaccgagtatgaaaaagatgctaacggtgaattagtagcgaaaaccagcctgaaagacacgactgttggccgtgccattctgtggatgattgtaccgaaaggtctgccttactccatcgtcaaccaggcgctgggtaaaaaagcaatctccaaaatgctgaacacctgctaccgcattctcggtctgaaaccgaccgttatttttgcggaccagatcatgtacaccggcttcgcctatgcagcgcgttctggtgcatctgttggtatcgatgacatggtcatcccggagaagaaacacgaaatcatctccgaggcagaagcagaagttgctgaaattcaggagcagttccagtctggtctggtaactgcgggcgaacgctacaacaaagttatcgatatctgggctgcggcgaacgatcgtgtatccaaagcgatgatggataacctgcaaactgaaaccgtgattaaccgtgacggtcaggaagagaagcaggtttccttcaacagcatctacatgatggccgactccggtgcgcgtggttctgcggcacagattcgtcagcttgctggtatgcgtggtctgatggcgaagccggatggctccatcatcgaaacgccaatcaccgcgaacttccgtgaaggtctgaacgtactccagtacttcatctccacccacggtgctcgtaaaggtctggcggataccgcactgaaaactgcgaactccggttacctgactcgtcgtctggttgacgtggcgcaggacctggtggttaccgaagacgattgtggtacccatgaaggtatcatgatgactccggttatcgagggtggtgacgttaaagagccgctgcgcgatcgcgtactgggtcgtgtaactgctgaagacgttctgaagccgggtactgctgatatcctcgttccgcgcaacacgctgctgcacgaacagtggtgtgacctgctggaagagaactctgtcgacgcggttaaagtacgttctgttgtatcttgtgacaccgactttggtgtatgtgcgcactgctacggtcgtgacctggcgcgtggccacatcatcaacaagggtgaagcaatcggtgttatcgcggcacagtccatcggtgaaccgggtacacagctgaccatgcgtacgttccacatcggtggtgcggcatctcgtgcggctgctgaatccagcatccaagtgaaaaacaaaggtagcatcaagctcagcaacgtgaagagcgttgtgaactccagcggtaaactggttatcacttcccgtaatactgaactgaaactgatcgacgaattcggtcgtactaaagaaagctacaaagtaccttacggtgcggtactggcgaaaggcgatggcgaacaggttgctggcggcgaaaccgttgcaaactgggacccgcacaccatgccggttatcaccgaagtaagcggttttgtacgctttactgacatgatcgacggccagaccattacgcgtcagaccgacgaactgaccggtctgtctagcctggtggttctggattccgcagaacgtaccgcaggtggtaaagatctgcgtccggcactgaaaatcgttgatgctcagggtaacgacgttctgatcccaggtaccgatatgccagcgcagtacttcctgccgggtaaagcgattgttcagctggaagatggcgtacagatcagctctggtgacaccctggcgcgtattccgcaggaatccggcggtaccaaggacatcaccggtggtctgccgcgcgttgcggacctgttcgaagcacgtcgtccgaaagagccggcaatcctggctgaaatcagcggtatcgtttccttcggtaaagaaaccaaaggtaaacgtcgtctggttatcaccccggtagacggtagcgatccgtacgaagagatgattccgaaatggcgtcagctcaacgtgttcgaaggtgaacgtgtagaacgtggtgacgtaatttccgacggtccggaagcgccgcacgacattctgcgtctgcgtggtgttcatgctgttactcgttacatcgttaacgaagtacaggacgtataccgtctgcagggcgttaagattaacgataaacacatcgaagttatcgttcgtcagatgctgcgtaaagctaccatcgttaacgcgggtagctccgacttcctggaaggcgaacaggttgaatactctcgcgtcaagatcgcaaaccgcgaactggaagcgaacggcaaagtgggtgcaacttactcccgcgatctgctgggtatcaccaaagcgtctctggcaaccgagtccttcatctccgcggcaagcttccaggagaccactcgcgtgctgaccgaagcagccgttgcgggcaaacgcgacgaactgcgcggcctgaaagagaacgttatcgtgggtcgtctgatcccggcaggtaccggttacgcgtaccaccaggatcgtatgcgtcgccgtgctgcgggtgaagctccggctgcaccgcaggtgactgcagaagacgcatctgccagcctggcagaactgctgaacgcaggtctgggcggttctgataacgagtaatcgttaatccgcaaataacgtaaaaacccgcttcggcgggtttttttatggggggagtttagggaaagagcatttgtcagaatatttaaggaatttctgaatactcataatcaatgtagagatgactaatatcctgaaactgactgaactaattgagtcaaactcggcaaggattcgatactattcctgtgtaactttcttaaggaacgagaatgaaacaggaagtggaaaagtggcgaccttttggacatccggatggtgatattcgtgatttaagttttcttgatgctcatcaggctgtctacgttcagcatcatgagggcaaagagcctttagagtatcgcttttgggttacctactctcttcactgcttcacaaaagattatgaacatcagacgaacgaagaaaaacaaagcttaatgtaccacgcgcctaaagaatctcgtcccttctgccagcaccgttataacttagcgcgcacacacttaaaaagaactattttggcgctgccagaaagcaacgttattcatgccgggtatggtagctatgccgtgattgaggtggacttagacggaggagataaggcattttactttgttgcgttcagggctttcagggaaaagaaaaaactccgtttgcatgtaactagcgcttatcccatttctgaaaaacagaaaggtaaaagtgtgaaatttttcaccattgcctacaacttattgagaaataagcagcttcctcagcccagtaaataacaaaacccaccttaaggtgggtttcgccagagaattatctctggtattcagaacgccattaccggactttgccttgaccttgcgataatcgcaggttgcgggatgtctgaatttcttcagtctgctgcatcctggaagatgagaacatgtgttcttattttcgtctctatcatagttgagtatttactctcttacaatcagatctctttcattgctcaacaggcgatggcttcagactttgcattacggaatttttaagaaaggcagggcgaaacgaggaagaagcttttcgccctggacaacattcctgctgacggcactaccataaaaaaacacaacgctttcaacaaccttgcgtttttcatcttccgtagcggctcggaataaatttacgttcttacattccgtctcatagtctttggctggcgcgtcccagatagctgtcccagtctttccataccggctgcaaaccctgagcggttaacgcggcagcaaccgcttccggtctgcgatcgtcgtgcggactgaactgttccaactcggggtgattatcggcatagccacctggctgcgttttgctgaaggcgctgacgttattgatcgccagcggaataacgcgatcgcgaaaccacggactttcccgcgtggagagactcagttcaatctccggtgcaagcagtcggaaggcgcagatggtttgcactaactggcgttcatccataatgctcgcaggctcaatgccgccagtacacgggcgcaggcgcggaaaggagacagagtaacggctttgccagtaatgctgttgcagccatagcaaatgttcggcaaccatatagctgtcaacgcgccagttgtcggaaaggccaattagcgcgccgaggcctatcttatcaatccccgcacgccccagccgatccggcgtttccagccgccagaagaagtcctgttttttgcctttcagatgatggcgggcataagtcgcctcgtgatatgtctcctgataaaccatcacgccatccagaccaagttgctttaactcggcgtattccgtctccgccagcggttgcacttccatctgtagactagagaactgttcacgaagggcagggagatgacgacgaaagtaatccatccccactttcgcctgatgttcaccagtgactaacagcagatgttcaaagcccatctcccgtatagcggcactttccctggcaatatccgcttcatccagcgttttgcgcttgatgcgattactcatggaaaatccacagtacgtgcagtcgttagcgcaaagattggaaagataaagcgggacgtagaaactaactgtgttgccaaatcgctgacgggtcagacgctgcgcccgttgggccagttgttccagatagccactggcggcagggcttaacagcgccatcatgtcgtcgcgggtgagttggctggcatttagcgcccgctctacgtcagcagccgttttgccgttgatacgcaggcggatgtcgtcccagtccagttgtcgccagcgatcgctgaaggttttcatgcgcttgcctccagaaatccggtcagcgggctggtggcatgagcaaaataactgcggctgcccggtccggactgacgtgccagtaggcctgcttctaccgccagacgaaatgccttcgccatgttgacgggatcgtccgcgacggcaatcgccgtattcactaacaccgcgtcggcccccatttccagcgcctgcgcggcatggctgggaacgccgatgccagcatcgacaaccaccggcactgtggcctgctggataataatctccagcatggcgcgggtttccagtccctgattgctgccaatcggcgcgccgagcggcatcaccgctgcacagccgacttcttccagacgtttacacaataccggatcggccccgcagtaaggcagcacgacaaatccctgttgtaccagcgtttcggcggctttcagggtttcgatgggatcgggcaacagccagcgggcgtcagggtgaatctctaattttaaccagtttgtgcctaacgcttcacgagccagatgggcggcgaaaatggcttcttccgctgttttcgccccggatgtatttggcagcagggtcacacccgccgcgataagcggttcgaggatagcgtcgttgtgctggcgcaagtcgacacgtttcatcgccagtgtcaccagctggctgccggaagcgcggatcgcctccaccatcagttgactagaagcgaatttccctgtgccggtaaacagatgactatcaaacgttttgtccgcaatacgtaacatttcaaccccctgcaataacctgaaaaagcaggatctggtcgccatcctgcacgatatgttgcgcccactgctcacgcgggacgatttgctgattaatcgccagagccgcgcccgcttgtcgttggtcgagttgctccagtagttcgtgaacagtttgcccggcggcgcactgcatcgcttgatcgttaaacaggatctgcattgcttcctccgcataccgggcaaccactggcgcggcgcaacgccaggctgcgccactggctgcttttaccgtcgaacagtcggagttctcccgcaggtgtctctataccgcttaataacttaatggcttccagtgcctgcaaagtgcccataaccccgaccaccgggccaaccacgcccgccgtgcggcagttgcgttctggctcctggttatctggccacaggcagcggtaacacccctgctcccagggcggcgtcagtaccatcaactgaccgccaaatccgaccgcgctggcggtgataagcggcgtgttgagtgccacgcaggcggcattaatctcctggcgagtcgccatattgtcggtacagtcgagcaccacatcggcccgtgcaaccgcatcttttaacgcctcacccgttaaccgttgttgtaatgctgtcagttgaatgtcgggattcaactgtgtcagtcgctgttggctgacctggcttttcgggcgatcgatatcttcagtggtaaagaggatttgtcgttgcagattgcttaaatgcacatcgtcgtcatctgccagtaccagcgtcccgacgccagcgcccgccaggtacagcgcagcaggtgtacccagcccgcccagaccgataatcagcacctggctgtcgagcagtttttgctgcccgtccagagcgatatcgtcgagcaggatttggcggctataacgcataaagtcacggtcattcatcgccaactcctgcaatttccagcaactgtgccgttgccaaacgccagtctgcggcttgagtaatggcgctgacgacggcgatactgccgacacccgttgctatcaccgcaggcgcgcgtgccagactgataccgccaatcgccacggtgggataatccgccagtcgctcaacatgccgtgccagctgttccagcccctgcggtgcagaaggcatctgtttggtttgcgtcgggaacacatgtcccagcgcgatataagaggggcgtgctgccagcgcgacgtcgatttccatatcgtcatgtgtgctaacgcccagccgcaggcctgccgcgcggatggcattgagatcggtggcttgcaaatcttcctgccccaaatggacgccatacgcctgatgcttgatcgccagccgccagtaatcgttgataaacaatcgcgcgttatagcggcggcccagcgcaattgccgccacgacatcggcttccacctcttcatcgcgccgatctttgatgcgtagctggagagtacgtacgcctgcatccaacagacgttcgatccactgtacgctgtccaccaccgggtacagtccactacgaaaaggtacaggaggaaaatcaggctgatacatcacgcttcctccttacgcaggtagatttctccgcctctggcacggaagttctcgctcatatccgccattcccatttcaatagtttgcgtggcggcgtaatcacgcacttcctggctgattttcatgctgcagaatttcggcccacacatggagcaaaaatgggcgactttaccactctcttgcggcagggtttcatcgtgataagcgcgggcggtaaacgggtcgagggccagattaaactggtcttcccagcgaaattcgaagcgggctttgctcatggcgttatcgcgaatttgcgcgcccggatgccctttcgccaggtcagcggcgtgggcagcaatcttataggtgataagcccctgcttaacatcttctttattgggcagacccagatgctcttttggcgttacgtaacagagcatcgcgcagccaaaccagccaatcatcgccgcaccaatcccgctcgtgaagtggtcatagcccggcgcaatatcggtagttagcggccccagagtgtaaaacggcgcttcgtggcagtgctctaactcctcggtcatattgcggcggatcatctgcatcggcacgtggcctgggccttcaatcatcacctgcacgtcatattcccaggcaattttggtcagttcgcccagcgtatgcagctcggcaaactgcgcttcatcgttggcgtcctgaatagaaccggggcgcagaccgtcgcccaggctcaggctaacgtcataagcggcacagatttcacaaatttcgcggaagtgttgatagaggaaattttcctgatgatgggagaggcaccatttcgccataatgctaccgccgcgagagacgataccggtcaggcgtttcgcggtcatcggcacatagcgcagcagtacgcccgcatggatagtgaagtaatccacaccttgctcggcctgttccagcagcgtgtcgcggaacgcttcccaggtaagatcttcggcgatcccgttaaccttctccagcgcctggtagatcggcactgtaccgatcggcaccgggctgttacgcaaaatccactcgcgggtttcgtgaatatagcgaccggtggagagatccatcaccgtatccgctccccagcgcgtggaccataccagcttttccacttcttcttcgatggaagaggtgaccgcgctgttgccgatattggcgttaacttttaccaggaaattgcgaccaataatcatcggctcgctttccggatgattaatgttggccgggataatcgcacgtccggcagcaacttcatcacggacaaattccgcagtgatattttccggcagatgtgcgccaaagctcattcccggatgctggtggcgtaaaacctcgctacggatgcgctcgcggcccatattctcgcggatggcgatgaattccatttccggcgtgatgatgccctggcgggcgtagtgcagttgggtgacacggcgtcctgctttggcgcgttttggtgttagtacgccgctaaaacgcagttcgtcgaggccatcatctgccagccgcgctttagtgtaatcggaactgcgcacggtaagttcttcggtatcgccgcgcgcatcgatccacggctggcgtagttttgccagcccttgctgcacgttaatggcaatctgcggatcaccatacgggccggaggtgtcgtagaccggaatcgcttcgttttcttcgtactgcggctgttctttgctaccgccaattagcgtcgggctaagctggatctcacgcatcggcacgcgcacgccggggtgtgtgccagtgatataaatgcgtttactgttgggaaaggcggtgccttccagggtgtcgataaaatgttgggcccgggcgcgttgttcgcggcgggtcagttttgttgcagacatagctcattccaaaaagttaaggacgtggcttgtcagacgacggatgaagcaagagacgatcgccgcaggggcgatgcgatagcagattaactcttgttcccttcgcaggtattagcctgatcaggttccgcggatcccgaataaacggtctcagccagttaaggcactccgacaagaaattagccccgcaaatggggcattgaatgtaaattacgcgttaacagcgcagaactcaagcaggatgtttgacgcgggcggcgtcaagcaccagcagaatcagcttatcttccagcacaaagcgcgcttccagcgcctcgccgatgtcagataaaacctgttgaaactcaaggtaattatcatgatcgatggcggtttccagactggaatcgtagtaatccataatctgttgagtattggcttcgagttgcggccaaatcttcgcggcgcgcgcgagttgcccgttgccttccagcttatgaagaatgcgctcataaatactgaaatgtccggcagacaagtaatcgaccaggctctgacaaaaatcatcaagggctttttcgtttagcctcatgtagctttctttgccaggcttaatgccaaccagattgtagtaagccacgagcagatgcttacgtacatgtagccagcgatcaaccagtttgttacttcctctgacgcgctccgtcaggttatcgagctggttaagcatgattgactccgcaagtttgtattcaaaaactgctcagtgagaaatgtaaaaaccatgttaaacatgccagtgatgcaaaggtagtgcaagagctatggatcgtataattgaaaaattagatcacggctggtgggtcgtcagccatgaacaaaaattatggttgccgaagggagaattgccatatggcgaagcggcaaatttcgatcttgtgggtcagcgcgcactacaaatcggcgaatggcagggggaacctgtttggttagtacaacagcagcggcgtcacgatatggggagcgtacgtcaggtcattgatctcgatgttgggctgtttcaactggccggacgaggcgtacaactggcggagttttaccgaagccataaatactgtggttactgcgggcatgaaatgtatccgagcaaaaccgaatgggcgatgctgtgcagccattgccgtgagcgttactacccgcaaatcgccccctgcattattgttgccatccgtcgcgatgatagcatcctcctcgcccagcatacccgccatcgtaacggtgtccatacagtacttgccggattcgtcgaagtgggcgaaaccctcgagcaggcagtcgcgcgggaagtgatggaagagagcggaattaaagttaaaaacttgcgttacgtgacttctcagccgtggccgtttcctcagtctttaatgaccgcgtttatggcggaatatgacagcggcgacatcgtgatcgacccgaaagaattgctcgaggcgaactggtatcgctatgacgatttgccgttactcccgccgcccggcaccgtagcgcgccgtctgatagaagatacggtggcgatgtgtcgggcagagtatgagtgatgatacactgaccgcctgacgcactaaggaacagccaaaatgaccgaacttaaaaacgatcgttatctgcgggcgctgctgcgccagcccgttgatgtcactccagtatggatgatgcgccaggcgggtcgctatctaccggaatataaagccacgcgcgcccaggcaggcgattttatgagcctgtgcaaaaacgccgagctggcgtgcgaagtgactttgcaaccgctgcgtcgctacccgctggatgcggcgatcctcttttccgatatcctcaccgtgccggacgcgatggggttagggctctattttgaagccggagaaggtccgcgttttaccagcccagtcacctgcaaagctgacgtcgataaactgccaattccggacccggaagatgaactgggttacgtgatgaacgcggtgcgtaccattcgtcgcgaactgaaaggcgaagtgccgctgattggtttttccggcagcccgtggacgctggcgacctacatggtggaaggcggcagcagcaaagccttcaccgtgatcaaaaaaatgatgtatgccgatccgcaggcgctgcacgctctgctcgataaactggcgaaaagcgtcactttgtatctgaatgcgcagattaaagccggtgctcaggcagtgatgattttcgacacctggggcggcgtgcttaccgggcgcgattatcaacagttcagcctctattacatgcataaaattgttgatggtttactgcgtgaaaacgacggtcgccgcgtaccggtcacgctgtttaccaaaggcggcggacagtggctggaagccatggcagaaaccggttgcgatgcgctgggcctcgactggacaacggacatcgccgatgcgcgccgccgtgtgggcaataaagtcgcgttgcagggtaatatggatccgagcatgctgtacgcgccgcctgcccgcattgaagaagaagtagcgactatacttgcaggtttcggtcacggcgaaggtcatgtctttaaccttggtcacggcattcatcaggatgtgccgccagaacatgctggcgtgttcgtggaggcagtgcatcgactgtctgaacagtatcaccgctaaggagtgattatggatctcgcgagtttacgcgctcaacaaatcgaactggcttcttctgtgatccgcgaggatcgactcgataaagatccaccggatctgatcgccggagccgatgtcgggtttgagcagggcggagaagtgacgcgagcggcgatggtgctgctgaaatatcccagccttgagctggtcgagtataaagttgcccgcatcgccaccaccatgccttacattccaggttttctttccttccgcgaatatcctgcgctgctggcagcgtgggagatgctgagccaaaagccggatttagtgtttgtcgatggtcatgggatcagccatcctcgccgtcttggcgtcgccagccattttggcttattggtggatgtgccgaccattggcgtggcgaaaaaacggctctgcggtaaattcgaaccgctctccagcgaaccgggcgcgctggccccactgatggataaaggcgagcagctggcctgggtctggcgcagcaaagcgcgctgtaacccgttgtttatcgctaccggccatcgggtcagcgtggacagcgcgctggcgtgggtacaacgctgcatgaaaggctatcgtctgccggagccaacgcgctgggcggacgcggtggccagcgaacgtccggcgttcgtgcgctatacagcaaatcagccctaattcaggtaaactgcggataatttccgtatttgagaactcaacatgttacaaaacccaattcatctgcgtctggagcgcctggaaagctggcagcatgtcactttcatggcttgcttatgcgaacgcatgtaccccaattacgccatgttctgccagcaaaccggttttggtgatgggcaaatttaccgtcgcattctcgatctcatctgggaaacgctgaccgttaaagacgcaaaagtaaatttcgacagccaactggagaaatttgaagaagcgattcctagtgccgacgatttcgatctgtacggcgtttatccggcaatcgatgcctgcgtggcgttaagtgaactggtccatagccgtttgagtggtgaaacgctcgaacacgcggtggaagtgagtaagacctccatcacgaccgttgcgatgctggaaatgactcaggctggtcgcgaaatgagcgatgaagagcttaaagaaaacccagctgtagagcaagaatgggacattcagtgggaaatattccgacttttagctgagtgcgaagaacgcgatatcgagctgataaaaggccttagggcagacctgcgtgaggcgggtgagagcaatattggtataatttttcagcaataagaccagaaaacgtgatttaacgcctgatttgtcgtacctggagtcttccctttcgccccccgtctggtctacatttggggggcgaaaaaaagtggctatcggtgcgtgtatgcaggagagtgctattctggcatttccgtcgcactcgatgcttagcaagcgataaacacattgtaaggataacttatgaacaagactcaactgattgatgtaattgcagagaaagcagaactgtccaaaacccaggctaaagctgctctggagtccactctggctgcaattactgagtctctgaaagaaggcgatgctgtacaactggttggtttcggtaccttcaaagtgaaccaccgcgctgagcgtactggccgcaacccgcagaccggtaaagaaatcaaaattgccgcagctaacgtaccggcatttgtttctggcaaggcactgaaagacgcagttaagtaagattgcgtggcagtgaacagttttaacgaaggggtggttagtccccttttgtctttctggcgtcgaagtttgatgctggctggcgctctgcttctcactgcctgtagtcataactctagtcttcctccctttaccgccagtggatttgctgaagaccagggcgcggtacgcatctggcgaaaagacagcggcgataatgtgcatctgcttgccgtgtttagcccgtggcgcagtggcgataccacgacgcgagagtatcgctggcagggcgataacctcacgctcatcaatatcaatgtttacagcaaaccgccggtgaatattcgcgcgcgttttgacgatcgcggtgatctgagctttatgcaacgtgaatccgatggggaaaagcagcagctttctaacgaccaaatcgatttataccgttatcgtgctgatcagatccgccagattagcgatgccttacgtcaggggagagtcgtgctgcgccaggggcgctggcatgcgatggaacagaccgtgaccacctgcgaagggcaaaccattaaacctgatttagatagccaggcgatagcgcatatcgagcgccgccagagccgctcttctgttgatgtcagcgtggcatggctggaagcgcccgaaggtagccaattactgttagtggcaaactctgatttctgtcgctggcaacccaacgagaaaacgttctgatttaccagtggcccatacccatatgaccgccaccaccgcagccgccgtagcccatgcccattccggctccgcgcggaatacccgcttcagccatcgcgatatctcgtttcacccgtaactcatctaagctctgacgcaaattctccatctctttggcgaccgcgttaattttgctgctatccggtgggttcgcggctaacagggcattgtattcataacgcttcgtcaccagttgctgttgcagtgcgctgctttgagcgtaaaagtcattatggattttctgccacgctgtctgttgttcgctggtcaaaggcgcggcattttgctgccacataccgtgtccgccgtgagcaaatgcagatgtgcttcccatcgccattgcactaagcgccatcattaccagggcaattttcgtgttccgtttcatggttaatcctccagtggttgtcttacttcgggtattgcatcttccgtgccaacgatgaaacgctgatatgacgggtaatctggcatgataaacgagtaaaaatgactcgcctgctgcgggtagcgagtcatttttactcattgaaacttaagcctttgtgttacagcgcagggtaagcgctgataaaagatggcatgatttctgctgtcagaaagggatgagcaggcaaagaagaagatgcgttttatgcaacgttctaaagactccttagctaaatggttaagcgcgatcctccccgtggtcattgttgggctggtgggattgtttgcggtaactgtgattcgtgattatgggcgggcaagcgaggcagaccgccaggcattactggaaaaaggtaatgtgcttatccgcgctctggagagcggaagccgcgtagggatggggatgcgaatgcaccatgtacagcaacaggcgcttctggaagagatggcgggacagccgggagtgttgtggttcgcagtcaccgatgcgcagggcatcattattcttcatagcgaccccgataaggtcgggcgtgcgctctatagcccggatgaaatgcagaaattaaagccagaggaaaactcccgctggcggctgcttgggaaaacggaaactacgcctgcacttgaggtctatcgtttgttccagccaatgagtgcgccctggcggcatggaatgcacaatatgccgcgctgtaacggcaaagctgtgccacaagtagatgcacaacaggctatttttatcgccgttgatgccagtgatctggttgcaacccagagtggggaaaagcgcaataccctgattatcctcttcgccctggcgacggtcttgctggcaagcgtattgagtttcttctggtatcgccgctatctgcgcagccgccagcttctacaagatgaaatgaagcgcaaagagaagctggtggcgctggggcatcttgcggcaggcgttgcccacgaaatccgtaacccactttccagcattaaaggactggcgaaatactttgccgagcgcgcgcctgcagggggagaagcgcatcaactggcgcaggtgatggcgaaagaggccgaccgtttaaaccgcgtggtaagcgagttgctggaactggttaagccaacgcatctggctttgcaggcggtggatctcaacacgctgattaaccacagtttacagctggtaagtcaggatgcaaacagccgggagatccagttacgctttaccgccaacgacacattaccggaaattcaggccgacccggacaggctgactcaggtcctgttgaatctctatctcaatgctattcaggcgattggtcagcatggcgtgattagcgtgacggccagcgaaagcggcgcgggcgtgaaaatcagcgttaccgacagcggtaagggaattgcggcagatcagcttgatgccatcttcactccgtacttcaccactaaagccgaaggcaccggattggggctggcggtcgtgcataatattgttgaacaacacggtggtacaattcaggtcgcaagccaggagggaaaaggcagtacgttcaccctctggcttccggtcaatattacgcgtaaggacccacaaggatgacgcacgataatatcgatattctggtggtggatgatgacattagccactgcactattttgcaggctttactgcgcggctggggctataacgtcgcgctggcgaacagcgggcgacaggcgttggagcaggtgcgggaacaggtttttgatcttgtgctttgcgatgtgcgaatggcggagatggacggcatcgccacgctgaaagagatcaaagcgttaaacccggcaattccggtgctgattatgactgcgtactccagcgtcgagacggcggtagaggcactgaaaactggggcgctggattatctcatcaagccgctggatttcgataacctacaggcgacgctggaaaaagcgctcgcgcatacgcacagtattgatgctgaaacacctgcggtgactgccagccagttcggtatggtcggtaaaagcccggcgatgcaacacctgctcagtgaaatcgccctcgtcgcgccaagcgaagccacggtactgatccacggcgattccggcaccggtaaagagctggtcgccagggcgattcacgccagtagcgcacgtagcgaaaaaccgctggtaacgctcaactgtgcggcactcaacgaatccttgctggaatctgaattgttcggtcacgaaaaaggggcgtttactggagccgataaacgccgggaagggcgctttgttgaggcggacggcggcacgctgtttctcgatgaaattggcgatatcagcccgatgatgcaggtgcgtctgctgcgtgcgattcaggagcgcgaagttcagcgtgtcggtagcaaccagattatcagcgttgatgtccggctgattgcggcgacccatcgcgatcttgccgcagaggtgaatgccgggcgttttcgccaggatctctactatcgcctgaatgtggtggcgattgaagtaccaagcctgcggcaacggcgggaagatatccctctgctggctggccattttctgcagcgctttgccgagcgtaatcgcaaggcggtaaaaggttttacgccccaggcgatggatctgttgattcattacgactggccgggaaatattcgtgagctggaaaacgcggtggaacgggcagtggtgctgctgaccggggaatatatttccgaacgcgagctgccgctggcgattgccagtacgccgatcccgctgggacaaagtcaggatattcagccgttggtggaagtggaaaaagaggtgattctggcggcgctggagaaaacgggcggcaacaaaaccgaagccgcccgtcagttagggatcacgcgcaaaacgctattggcaaaactgagccgttaattctgctcgcgttcgatagcgcgccagccgatatctttccggcagaagcagtcgtcccagtggatatcggtcattaaggcataggcgcgtttctgcgcttctgccacggtatgacccagcgcggtgacgcacagtacgcgcccgccgttggtcactacctgctcgtcatccgccagttttgtgcccgcgtggaacactttgccgcctgccacttcttccagcggcaggccgtggatcacgtcaccggtgcggtaatcacccggatatccacccgcagccatcaccacgccgagagaagcgcgttcatcccactcggacgttttctcgtccagtttgctttcacaggccgccaggcagagctcaaccagatcggacttcatgcgcagcataatcggctgggtttccggatcgccaaagcggcagttaaattcaataaccttcggattgccctgtttgtcgatcatcaggcccgcgtagagaaaaccggtgtaggtgttgccttccgccgccatgcctttcacggttggccagataatacgttccatggtgcgctgatgaacgtcatcggttactaccggcgcgggggagtaagcgcccatcccgccggtgtttggtccggtatctttatcgcctacgcgtttgtgatcctggctggtagccatcggcagcacatgctcgccgtccaccatcacgataaagctcgcttcttcgccatcgaggaactcttcgataacgatgcgatgacccgcgtcgccaaaagcgttgcccgccagcatatcgtgaacagccgcttccgcttcttccagcgtcatcgccacgataacgcctttcccggcagccagaccgtccgctttaatgacgattggcgcgcctttctcacgcagatacgccagcgcaggttctacctcggtgaagttctggtattccgccgtagggatcttatggcgggccaggaaatctttggtaaacgctttactgccttccagttgggccgcacctgcggttgggccgaagattttcagcccggcggcgcggaaggtatcgaccacgcctttcaccagcggcgcttccgggccgacgatggtcagatcaatcttttcgttttgtgcgaaatccaacagcgccgggatatcggtcacgccaatagcaacgttttgcagcgcgggttccagtgcagtgcctgcattacccggagcaacaaaaacagtctcaaccagcgggctctgggccgctttccaggccagcgcgtgctcgcgcccgccgttaccaatcactaatactttcatctattgctccattaatggcggaagtggcgcatgtcggtgaagagcatcgcaataccgtgctcgtcggcggcggcaatcacttcgtcatcacggatagaaccgccaggctggattacgcaggtcacgcccgcagcggcggcggcatcaataccgtcgcggaacgggaagaacgcgtcagaagccatgctggaacctttcacttccaggccttcatcggccgctttaataccggcgatttttgcggagtacacgcggctcatctggcccgcgccaatgccgatagtcatattgtttttggcatagacgatagcgttggatttcacaaacttcgccaccttccagcagaacagcgcatcacgcagttcctgttcgctcggctgacgtttggtcaccacgcgcagttcttccgcaccgaccatccccaggtcacgatcctgaaccagcagaccgccgttcacgcgtttgaaatcgaggcccggaacacgctcgccccactgaccgcaggtcagaacgcgtacgttctgtttggcggcggtgattttcagggcttcttcgctggcggacggcgcaataatcacttcgacaaactgacgagaaatgatggcctgtgcggtttccgcatccagctcgcggttaaaggcaatgatgccgccgaatgcggaggttgggtcggttttgtacgcgcgatcgtaagcatcaagaatggaattgccgatagccacgccgcaagggttggcgtgcttcacaatcacacatgccggctcggcgaactctttcacgcactccagcgccgcatcggtatcggcgatgttgttataagagagggctttaccctgaacctgggttgcggtagcaacggaggcttctttcacattctcttctatatagaaggcagcctgctggtggctgttctcgccgtaacgcatatccagcttcttaatgaagttcaggttcagcgtgcgtgggaagcgaccggcggcttctttgctttcaccgtggtaagccggaaccatgctgccgaagtagttggcaatcatgctgtcgtaggcggcagtgtgttcgaaggctttgatggcgaggtcgaaacgggttgcaagcgtcaggcttccttcgttgtcatccatctctttaataatggcgtcatagtcgctgctcttcaccacgattgcgacatctttatggttcttggcggcggagcgcaccatcgttgggccgccgatatcgatgttctcaaccgcatcttccaggctgcaaccttcacgggccacggtctgggcgaacggatacaggttaacaaccaccatatcgataggctggatctgatgttcttccataatggcatcgtcctggccgcgacggcccagaatgccaccatgtactttcggatgcagggtcttcacgcgtccatccatcatctccgggaaaccggtgtaatcggaaacttcggttaccggcagacctttttctgctaacagacgggcagtgccccctgtagacagcagctccacaccgcgtgcggaaagtgcctgggcgaattcgacgataccggctttgtcagaaacactgagcagagcgcggcggactggacgacgttgttgcatggtaaatcccctggatttgactattacagagagcgttagctgaatttttcgcgaaaaactcagctaacgcccctaacggggcatccttatttttcgcccgcattgtaacgaaaacgtttgcgcaacgctcgcgaatttttctctttcaatggtgatcacaattttgactgtggttaccgtgggcaaaatacagaaattacattgatgattgtggataactctgtgcgtaaaaaggtataaagcgggcttttgctggggaatgcagcagtcagtcatttttctgcaatttttctattgcggcctgcggagaactccctataatgcgcctccatcgacacggcggatgtgaatcacttcacacaaacagccggttcggttgaagagaaaaatcctgaaattcagggttgactctgaaagaggaaagcgtaatatacgccacctcgcgacagtgcgctaaagcgcgtcgcaactgctctttaacaatttatcagacaatctgtgtgggcactcgaagatacggattcttaacgtcgcaagacgaaaaatgaataccaagtctcaagagtgaacacgtaattcattacgaagtttaattctttgagcatcaaacttttaaattgaagagtttgatcatggctcagattgaacgctggcggcaggcctaacacatgcaagtcgaacggtaacaggaagaagcttgcttctttgctgacgagtggcggacgggtgagtaatgtctgggaaactgcctgatggagggggataactactggaaacggtagctaataccgcataacgtcgcaagaccaaagagggggaccttcgggcctcttgccatcggatgtgcccagatgggattagctagtaggtggggtaacggctcacctaggcgacgatccctagctggtctgagaggatgaccagccacactggaactgagacacggtccagactcctacgggaggcagcagtggggaatattgcacaatgggcgcaagcctgatgcagccatgccgcgtgtatgaagaaggccttcgggttgtaaagtactttcagcggggaggaagggagtaaagttaatacctttgctcattgacgttacccgcagaagaagcaccggctaactccgtgccagcagccgcggtaatacggagggtgcaagcgttaatcggaattactgggcgtaaagcgcacgcaggcggtttgttaagtcagatgtgaaatccccgggctcaacctgggaactgcatctgatactggcaagcttgagtctcgtagaggggggtagaattccaggtgtagcggtgaaatgcgtagagatctggaggaataccggtggcgaaggcggccccctggacgaagactgacgctcaggtgcgaaagcgtggggagcaaacaggattagataccctggtagtccacgccgtaaacgatgtcgacttggaggttgtgcccttgaggcgtggcttccggagctaacgcgttaagtcgaccgcctggggagtacggccgcaaggttaaaactcaaatgaattgacgggggcccgcacaagcggtggagcatgtggtttaattcgatgcaacgcgaagaaccttacctggtcttgacatccacggaagttttcagagatgagaatgtgccttcgggaaccgtgagacaggtgctgcatggctgtcgtcagctcgtgttgtgaaatgttgggttaagtcccgcaacgagcgcaacccttatcctttgttgccagcggtccggccgggaactcaaaggagactgccagtgataaactggaggaaggtggggatgacgtcaagtcatcatggcccttacgaccagggctacacacgtgctacaatggcgcatacaaagagaagcgacctcgcgagagcaagcggacctcataaagtgcgtcgtagtccggattggagtctgcaactcgactccatgaagtcggaatcgctagtaatcgtggatcagaatgccacggtgaatacgttcccgggccttgtacacaccgcccgtcacaccatgggagtgggttgcaaaagaagtaggtagcttaaccttcgggagggcgcttaccactttgtgattcatgactggggtgaagtcgtaacaaggtaaccgtaggggaacctgcggttggatcacctccttaccttaaagaagcgttctttgcagtgctcacacagattgtctgatagaaagtgaaaagcaaggcgtcttgcgaagcagactgatacgtccccttcgtctagaggcccaggacaccgccctttcacggcggtaacaggggttcgaatcccctaggggacgccacttgctggtttgtgagtgaaagtcacctgccttaatatctcaaaactcatcttcgggtgatgtttgagatatttgctctttaaaaatctggatcaagctgaaaattgaaacactgaacaacgaaagttgttcgtgagtctctcaaattttcgcaacacgatgatgaatcgtaagaaacatcttcgggttgtgaggttaagcgactaagcgtacacggtggatgccctggcagtcagaggcgatgaaggacgtgctaatctgcgataagcgtcggtaaggtgatatgaaccgttataaccggcgatttccgaatggggaaacccagtgtgtttcgacacactatcattaactgaatccataggttaatgaggcgaaccgggggaactgaaacatctaagtaccccgaggaaaagaaatcaaccgagattcccccagtagcggcgagcgaacggggagcagcccagagcctgaatcagtgtgtgtgttagtggaagcgtctggaaaggcgcgcgatacagggtgacagccccgtacacaaaaatgcacatgctgtgagctcgatgagtagggcgggacacgtggtatcctgtctgaatatggggggaccatcctccaaggctaaatactcctgactgaccgatagtgaaccagtaccgtgagggaaaggcgaaaagaaccccggcgaggggagtgaaaaagaacctgaaaccgtgtacgtacaagcagtgggagcacgcttaggcgtgtgactgcgtaccttttgtataatgggtcagcgacttatattctgtagcaaggttaaccgaataggggagccgaagggaaaccgagtcttaactgggcgttaagttgcagggtatagacccgaaacccggtgatctagccatgggcaggttgaaggttgggtaacactaactggaggaccgaaccgactaatgttgaaaaattagcggatgacttgtggctgggggtgaaaggccaatcaaaccgggagatagctggttctccccgaaagctatttaggtagcgcctcgtgaattcatctccgggggtagagcactgtttcggcaagggggtcatcccgacttaccaacccgatgcaaactgcgaataccggagaatgttatcacgggagacacacggcgggtgctaacgtccgtcgtgaagagggaaacaacccagaccgccagctaaggtcccaaagtcatggttaagtgggaaacgatgtgggaaggcccagacagccaggatgttggcttagaagcagccatcatttaaagaaagcgtaatagctcactggtcgagtcggcctgcgcggaagatgtaacggggctaaaccatgcaccgaagctgcggcagcgacgcttatgcgttgttgggtaggggagcgttctgtaagcctgcgaaggtgtgctgtgaggcatgctggaggtatcagaagtgcgaatgctgacataagtaacgataaagcgggtgaaaagcccgctcgccggaagaccaagggttcctgtccaacgttaatcggggcagggtgagtcgacccctaaggcgaggccgaaaggcgtagtcgatgggaaacaggttaatattcctgtacttggtgttactgcgaaggggggacggagaaggctatgttggccgggcgacggttgtcccggtttaagcgtgtaggctggttttccaggcaaatccggaaaatcaaggctgaggcgtgatgacgaggcactacggtgctgaagcaacaaatgccctgcttccaggaaaagcctctaagcatcaggtaacatcaaatcgtaccccaaaccgacacaggtggtcaggtagagaataccaaggcgcttgagagaactcgggtgaaggaactaggcaaaatggtgccgtaacttcgggagaaggcacgctgatatgtaggtgaggtccctcgcggatggagctgaaatcagtcgaagataccagctggctgcaactgtttattaaaaacacagcactgtgcaaacacgaaagtggacgtatacggtgtgacgcctgcccggtgccggaaggttaattgatggggttagcgcaagcgaagctcttgatcgaagccccggtaaacggcggccgtaactataacggtcctaaggtagcgaaattccttgtcgggtaagttccgacctgcacgaatggcgtaatgatggccaggctgtctccacccgagactcagtgaaattgaactcgctgtgaagatgcagtgtacccgcggcaagacggaaagaccccgtgaacctttactatagcttgacactgaacattgagccttgatgtgtaggataggtgggaggctttgaagtgtggacgccagtctgcatggagccgaccttgaaataccaccctttaatgtttgatgttctaacgttgacccgtaatccgggttgcggacagtgtctggtgggtagtttgactggggcggtctcctcctaaagagtaacggaggagcacgaaggttggctaatcctggtcggacatcaggaggttagtgcaatggcataagccagcttgactgcgagcgtgacggcgcgagcaggtgcgaaagcaggtcatagtgatccggtggttctgaatggaagggccatcgctcaacggataaaaggtactccggggataacaggctgataccgcccaagagttcatatcgacggcggtgtttggcacctcgatgtcggctcatcacatcctggggctgaagtaggtcccaagggtatggctgttcgccatttaaagtggtacgcgagctgggtttagaacgtcgtgagacagttcggtccctatctgccgtgggcgctggagaactgaggggggctgctcctagtacgagaggaccggagtggacgcatcactggtgttcgggttgtcatgccaatggcactgcccggtagctaaatgcggaagagataagtgctgaaagcatctaagcacgaaacttgccccgagatgagttctccctgactccttgagagtcctgaaggaacgttgaagacgacgacgttgataggccgggtgtgtaagcgcagcgatgcgttgagctaaccggtactaatgaaccgtgaggcttaaccttacaacgccgaaggtgttttggcggattgagagaagattttcagcctgatacagattaaatcagaacgcagaagcggtctgataaaacagaatttgcctggcggcagtagcgcggtggtcccacctgaccccatgccgaactcagaagtgaaacgccgtagcgccgatggtagtgtggggtctccccatgcgagagtagggaactgccaggcatcaaattagaaaaaccccggtccataaggccggggttttttgcatatcaattatttgcatgatgaagggaatctcatgagtgttctgtatatccaaattcgtcgtaatcaaattactgttcgcgatcttgaaagcaaacgtgaagtgagtggagacgctgccttcagtaaccagcgcctgttaatcgccaatttctttgttgcagaaaaagttctgcaagatcttgttctgcaactccacccacgtagtacctggcattcttttttgccagcaaaacgtatggatattgttgtgagcgcactggaaatgaatgagggcggtttgagtcaggttgaggaacgcattctccatgaagtggtcgctggggcaacgttaatgaaatatcgccagttccacatccatgcgcaaagtgcggtactcagtgatagtgcggtcatggcaatgcttaagcagaaataatcgtgtcaccattggtgggtactaaacctgaagttcagcccaccgggatgagaaaaaatcgcttacgcccccacatacgccagattcagcaacggatacggtttccccaaatcgtccacctcagagcgtcccgtaaccttaaaacccaccttcttatagaacccaaccgcctgctcattttgctcattaacgttggttgtcagttccggtgccatgctgagcgcatgctccaccagcacccgacctacgccgcagccgcgcacatcaggatcgataaacagcgcatccatatgctgcccacttagcaacataaatccaaccggctgatcccgctcattaaccgcgacccacaacggcgcttccggcaggaaggaacgaactaggtcctccagctcggtccgatactctgcacttagaaaatcgtgagtggcatcgacagaacgacaccaaatcgcaacgagttcctccccttcctcatgccgactgcggcgaatactaataaccattttctctccttttagtcattcttatattctaacgtagtcttttccttgaaactttctcaccttcaacatgcaggctcgacattggcaaattttctggttatcttcagctatctggatgtctaaacgtataagcgtatgtagtgaggtaatcaggttatgccgattcgtgtgccggacgagctacccgccgtcaatttcttgcgtgaagaaaacgtctttgtgatgacaacttctcgtgcgtctggtcaggaaattcgtccacttaaggttctgatccttaacctgatgccgaagaagattgaaactgaaaatcagtttctgcgcctgcttagtaacagtcctttgcaggtcgatattcagctgttgcgcatcgattcccgtgaaagccgcaacacgcccgcagagcatctgaacaacttctactgtaactttgaagatattcaggatcagaactttgacggtttgattgtaactggtgcgccgctgggcctggtggagtttaatgatgtcgcttactggccgcagatcaaacaggtgctggagtggagcaaagatcacgtcaccagcacgctgtttgtctgctgggcggtacaggccgcgctcaatatcctctacggcattcctaagcaaactcgcaccgaaaaactctctggcgtttacgagcatcatattctccatcctcatgcgcttctgacgcgtggctttgatgatagtttcctggcaccgcatagccgctatgctgactttccggcagcgttgattcgtgattacaccgatctggaaattctggcagagacggaagaaggggatgcatatctgtttgccagtaaagataagcgcattgcctttgtgacgggccatcccgaatatgatgcgcaaacgctggcgcaggaatttttccgcgatgtggaagccggactagacccggatgtaccgtataactatttcccgcacaatgatccgcaaaatacaccgcgagcgagctggcgtagtcacggtaatttactgtttaccaactggctcaactattacgtctaccagatcacgccatacgatctacggcacatgaatccaacgctggattaatcttctgtgatagtcgatcgttaagcgattcagcaccttacctcaggcaccttcgggtgccttttttatttccgaaacgtacctcagcaggtgaataaattttattcatattgttatcaacaagttatcaagtatttttaattaaaatggaaattgtttttgattttgcattttaaatgagtagtcttagttgtgctgaacgaaaagagcacaacgatccttcgttcacagtggggaagttttcggatccatgacgaggagctgcacgatgactgaacaggcaacaacaaccgatgaactggctttcacaaggccgtatggcgagcaggagaagcaaattcttactgccgaagcggtagaatttctgactgagctggtgacgcattttacgccacaacgcaataaacttctggcagcgcgcattcagcagcagcaagatattgataacggaacgttgcctgattttattagcgaaacagcttccattcgcgatgctgattggaaaattcgcgggattcctgcggacttagaagaccgccgcgtagagataactggcccggtagagcgcaagatggtgatcaacgcgctcaacgccaatgtgaaagtctttatggccgatttcgaagatagtctggcaccagactggaacaaagtgatcgacgggcaaattaacctgcgtgatgcggttaacggcaccatcagttacaccaatgaagcaggcaaaatttaccagctcaagcccaatccagcggttttgatttgtcgggtacgcggtctgcacttgccggaaaaacatgtcacctggcgtggtgaggcaatccccggcagcctgtttgattttgcgctctatttcttccacaactatcaggcactgttggcaaagggcagtggtccctatttctatctgccgaaaacccagtcctggcaggaagcggcctggtggagcgaagtcttcagctatgcagaagatcgctttaatctgccgcgcggcaccatcaaggcgacgttgctgattgaaacgctgcccgccgtgttccagatggatgaaatccttcacgcgctgcgtgaccatattgttggtctgaactgcggtcgttgggattacatcttcagctatatcaaaacgttgaaaaactatcccgatcgcgtcctgccagacagacaggcagtgacgatggataaaccattcctgaatgcttacagtcgcctgttgattaaaacctgccataaacgcggtgcttttgcgatgggcggcatggcggcgtttattccgagcaaagatgaagagcacaataaccaggtgctcaacaaagtaaaagcggataaaagcctggaagccaataacggtcacgatggcacatggatcgctcacccaggccttgcggacacggcaatggcggtattcaacgacattctcggctcccgtaaaaatcagcttgaagtgatgcgcgaacaagacgcgccgattactgccgatcagctgctggcaccttgtgatggtgaacgcaccgaagaaggtatgcgcgccaacattcgcgtggctgtgcagtacatcgaagcgtggatctctggcaacggctgtgtgccgatttatggcctgatggaagatgcggcgacggctgaaatttcccgtaccagcatctggcagtggatccatcatcaaaaaacgttgagcaatggcaaaccggtgaccaaagccttgttccgccagatgctgggcgaagagatgaaagtcattgccagcgaactgggcgaagaacgtttctcccaggggcgttttgacgatgccgcacgcttgatggaacagatcaccacttccgatgagttaattgatttcctgaccctgccaggctaccgcctgttagcgtaaaccaccacataactatggagcatctgcacatgaaaacccgtacacaacaaattgaagaattacagaaagagtggactcaaccgcgttgggaaggcattactcgcccatacagtgcggaagatgtggtgaaattacgcggtagtgtcaatcctgaatgcacgctggcgcaactgggcgcagcgaaaatgtggcgtctgctgcacggtgagagcaaaaaaggctacatcaacagcctcggcgcactgactggcggtcaggcgctgcaacaggcgaaagcgggtattgaagcagtctatctgagcggatggcaggtagcggcggacgctaacctggcggccagcatgtatccggatcagagcctctatccggcaaacagcgtgccagctgtggtggagcggatcaacaacaccttccgtcgtgccgatcagatccaatggtccgcgggcattgagccgggcgatccgcgctatgtcgattacttcctgccgatcgttgccgatgcggaagccggttttggcggtgtcctgaatgcctttgaactgatgaaagcgatgattgaagccggtgcagcggcagttcacttcgaagatcagctggcgagtgtgaagaaatgcggtcacatgggcggcaaagttttagtgccaactcaggaagctattcagaaactggtcgcggcgcgtctggcagctgacgtgacgggcgttccaaccctgctggttgcccgtaccgatgctgatgcggcggatctgatcacctccgattgcgacccgtatgacagcgaatttattaccggcgagcgtaccagtgaaggcttcttccgtactcatgcgggcattgagcaagcgatcagccgtggcctggcgtatgcgccatatgctgacctggtctggtgtgaaacctccacgccggatctggaactggcgcgtcgctttgcacaagctatccacgcgaaatatccgggcaaactgctggcttataactgcagcccgagcttcaactggcagaaaaacctcgacgacaaaactattgccagcttccagcagcagctgagcgatatgggctacaagttccagttcatcaccctggcaggtatccacagcatgtggttcaacatgtttgacctggcaaacgcctatgcccagggcgagggtatgaagcactacgttgagaaagtgcagcagccggaatttgccgccgcgaaagatggctataccttcgtatctcaccagcaggaagtgggtacaggttacttcgataaagtgacgactattattcagggcggcacgtctagtgtcaccgcgctgaccggctccactgaagaaagccagttctaagcaacaacaaccgttgctgactgtaggccggataaggcgttcacgccgcatccggcaatcggtgcacgatgcctgatgcgacgcttgcgcgtcttatcatgcctacagccgttgccgaacgtaggctggataaggcgtttacgccgcatccggcaattctctgctcctgatgagggcgctaaatgccgcgtggcctggaattattgattgctcaaaccattttgcaaggcttcgatgctcagtatggtcgattcctcgaagtgacctccggtgcgcagcagcgtttcgaacaggccgactggcatgctgtccagcaggcgatgaaaaaccgtatccatctttacgatcatcacgttggtctggtcgtggagcaactgcgctgcattactaacggccaaagtacggacgcggcatttttactacgtgttaaagagcattacacccggctgttgccggattacccgcgcttcgagattgcggagagcttttttaactccgtgtactgtcggttatttgaccaccgcagccttactcccgagcggctttttatctttagctctcagccagagcgccgctttcgtaccattccccgcccgctggcgaaagactttcaccccgatcacggctgggaatctctactgatgcgcgttatcagcgacctaccgctgcgcctgcgctggcagaataaaagccgtgacatccattacattattcgccatctgacggaaacgctggggacagacaacctcgcggaaagtcatttacaggtggcgaacgaactgttttaccgcaataaagccgcctggctggtaggcaaactgatcacaccttccggcacattgccatttttgctgccgatccaccagacggacgacggcgagttatttattgatacctgcctgacgacgaccgccgaagcgagcattgtttttggctttgcgcgttcttattttatggtttatgcgccgctgcccgcagcgctggtcgagtggctacgggaaattctgccaggtaaaaccaccgctgaattgtatatggctatcggctgccagaagcacgccaaaaccgaaagctaccgcgaatatctcgtttatctacagggctgtaatgagcagttcattgaagcgccgggtattcgtggaatggtgatgttggtgtttacgctgccgggctttgatcgggtattcaaagtcatcaaagacaggttcgcgccgcagaaagagatgtctgccgctcacgttcgtgcctgctatcaactggtgaaagagcacgatcgcgtgggccgaatggcggacacccaggagtttgaaaactttgtgctggagaagcggcatatttccccggcattaatggaattactgcttcaggaagcagcggaaaaaatcaccgatctcggcgaacaaattgtgattcgccatctttatattgagcggcggatggtgccgctcaatatctggctggaacaagtggaaggtcagcagttgcgcgacgccattgaagaatacggtaacgctattcgccagcttgccgctgctaacattttccctggcgacatgctgtttaaaaacttcggtgtcacccgtcacgggcgtgtggttttttatgattacgatgaaatttgctacatgacggaagtgaatttccgcgacatcccgccgccgcgctatccggaagacgaacttgccagcgaaccgtggtacagcgtcagcccgggcgatgttttcccggaagagtttcgccactggctatgcgccgacccgcgtattggtccgctgtttgaagagatgcacgccgacctgttccgcgctgattactggcgcgcactacaaaaccgcatacgtgaagggcatgtggaagatgtttatgcgtatcggcgcaggcaaagatttagcgtacggtatggggagatgcttttttgagtaaagcttccatataatttttctccgcaatgtatcgagggttatccgtaaagccaaagctttcagccatcttatttaatgtattaaggattaattcagcaataacccggtgaccaaattcaaaagccaactcaaaggcagagtatttttgtggggctttgtgttgccaaaaatccataatatcttcagcggtaaatccaaacaggcgtgcatggtcagataaagcaagataaaccgtctctacaacattttgttgtttatgctgtatcgcactaaacaaaccgggatattcattagaattatttgccaggaggaggggcttcatattttttttatcgaatttaaacgtattaaacagagtgggtaatgcgttaaaaatagtattaataacgttcatgtgtccgcgctgcatggccataaacaaacccgtgtcgcgcgcaagacttttagcggtcagaagatctacaatatcggaagcactaatgttaatttcctgggctaggctgggcaatgcttcaagaataactttcacgatatcgctatgtccattttgcatcgccagatatagtcctgggcaaccataaaaatcctttgccttcaggagatcgagtacctgttctttagtcaaatgacatgtgcgaattaacaaaggtaacgcgttcaaaacaattttcagcatgtcggcatcaccattcgccataacatggtataaaacatggctggacgttctatttttggcactcaggaatttatacacttgttcgttatctaaatgatgtgttgcggccagtttaggtaaggcgttcagaatgctggttacaacatttttatccttacgacttatcgctaaaaataatccagaaaaaccatttttatcttttgcctccagaatatgcatgagattttttttgctgagtaatccttcatatcctgtttcactcaaactattgaaaatagtctcaacgatatccgcattaccataatttatagccaaatataaacctggcaggttaatactattataggcagtcaacatttctgttctatgtagttctggcattttctggagttgaatcatcagttgcgtaagttggtgattctgaccaattgccattagcaaattcatcgttgcaggacttaatggaggggttatttcatccacagatccttttaacatcaatagctgttctttcggaagtgctggaattattgcaacagattgattaataacatgatcattactccatttcaggaggctataatctacattcataaaatccatcagagaatagtgtttaatattctctttgctttcgctcataattcttattttatcgttagttacattaggatcataaacgctaaccacgtaatgggtacatccttcagttgtgttctttattcttagccggaccgtcaaagcatggttatccaccagtaatatggctgccataacactgatgccattactttccatcttgtcaaaatatgctttcataactagcccgaaatcaccgcaggcagcaacgcaacgcccctcaggacggctggaaaccaacgccaaagtctggtttttgcattttttgttgaagtgcgtgagaaatttttcagcactagagtaatcatcttgatggggtttgtaatcaacattctgataaatatcattaatatattgtgcagcaatgtgtcggcatactatacggttttggggtcgccccggaaaataacattgaccattaagtttaattcttgggaattctttttcttttctatcactttttaggtttaattcttgtttatcaagagtgtcactgcgttgaggtaaaatttccattaggtatttttcaaatattggggcaatggtttgagtaagtgtcgtgttttcgtttttattaattatcgtaatttctttcttatcagcttgtaagacggacgtggaaaatttaatgacaaaatccttgttgctaaagatatgacgaccattttgtctacagttctcactgaagctttttaatagaggcgtcgccagctccttgccagaaaatttatcctcgagttctttataaaacaattcactcagggtttggtgttcatttgtctgggctgtattattaatatttgcagagaaagaactacgaggaatacgagtaatcatttaaatatctcattgtttattgatgtcttgaattttaactatcagaacagtgaaaaaatttaatatgattacaactaaagaaatatcataaatcgctcaatctcataatgcagccgtaaaagtttcggtggaatgagatcttgcgattttgttaataattaagtggtttgatgtttaaaaataatgctgagttaataaaagtgtgtgaagtgtatgacattaagttattttggcgtcaatgcgattaacagacacccttattctattgccactcaggtatgatgggcagaatattgcctctgcccgccagaaaaagtcagcgcattccaccgtacgccagcgtcacttccttcgccgctttaatcaccatcgcgccaaactcggtcacgcggtcatcggtaatacgactaatcggtccggaaatagaaattgcggcaaacggttcacggtgctcatcgaaaatacacgctgcaaggcaacgtagccccagtgcatgttcctcatcgtcaaaactataaccccgtttgcgcgtttgggcgagatcttcttttaaatgcacaggagacaccagcgttgcgtgggtataggcatgtaaccctttgcggtgcagcagcttcgtcacctgttcttcgctcagttgggctaaaaaggctttacccgcaccggaagcgtgcatcggcaatttaccgccgataggcgcggacattcgcatcagatgcgtacactgtacctggtcgataataatcgcttcgtgatcgctttgatcaagcaccgccatattgaccgtttcgccagactcttccattagattgcgcaggatagggtgaacaatcgctaacaaattacggctctggagaaagctgctgccgaccataaaggcatgtgcgccgattgcccaatgtcccagttcgccaacctgacgcacgaaaccctgctgttgcatcgtggttagcaggcggtgggtcgtggaattgggtaacccggcttgttgcgccagttccgtgagtgccacactgccattggattcggcaatccactccagtaatttcaggccacgcgttaaagactgaacctgtccagtcgctggtgcggtggcaacggcgggttttctgccgcgtttcgcgggaatgggtgcgaccatgacagtctcttttttctgtatcgtggaaatcattttcatttttattgttagctaatgcaatagttactgaactgatccgatgagttaatgttgaacaaatctcatgttgcgtggtggtcgcttttaccacagatgcgtttatgccagtatggtttgttgaatttttattaaatctgggttgagcgtgtcgggagcaagtgtgagcagcaaagtggaacaactgcgtgcgcagttaaatgaacgtattctggtgctggacggcggtatgggcaccatgatccagagttatcgactgaacgaagccgattttcgtggtgaacgctttgccgactggccatgcgacctcaaaggcaacaacgacctgctggtactcagtaaaccggaagtgatcgccgctatccacaacgcctactttgaagcgggcgcggatatcatcgaaaccaacaccttcaactccacgaccattgcgatggcggattaccagatggaatccctgagcgcggaaatcaactttgcggcggcgaaactggcgcgagcttgtgctgacgagtggaccgcgcgcacgccagagaaaccgcgctacgttgccggtgttctcggcccgaccaaccgcacggcgtctatttctccggacgtcaacgatccggcatttcgtaatatcacttttgacgggctggtggcggcttatcgagagtccaccaaagcgctggtggaaggtggcgcggatctgatcctgattgaaaccgttttcgacacccttaacgccaaagcggcggtatttgcggtgaaaacggagtttgaagcgctgggcgttgagctgccgattatgatctccggcaccatcaccgacgcctccgggcgcacgctctccgggcagaccaccgaagcattttacaacagtttgcgccacgccgaagctctgacctttggcctgaactgtgcgctggggcccgatgaactgcgccagtacgtgcaggagctgagtcggattgcggaatgctacgtcaccgcgcacccgaacgccgggctacccaacgcctttggtgagtacgatctcgacgccgacacgatggcaaaacagatacgtgaatgggcgcaagcgggttttctcaatatcgtcggcggctgctgtggcaccacgccacaacatattgcagcgatgagtcgtgcagtagaaggattagcgccgcgcaaactgccggaaattcccgtagcctgccgtttgtccggcctggagccgctgaacattggcgaagatagcctgtttgtgaacgtgggtgaacgcaccaacgtcaccggttccgctaagttcaagcgcctgatcaaagaagagaaatacagcgaggcgctggatgtcgcgcgtcaacaggtggaaaacggcgcgcagattatcgatatcaacatggatgaagggatgctcgatgccgaagcggcgatggtgcgttttctcaatctgattgccggtgaaccggatatcgctcgcgtgccgattatgatcgactccagtaaatgggacgtcattgaaaaaggtctgaagtgtatccagggcaaaggcattgttaactctatcagcatgaaagagggcgtcgatgcctttatccatcacgcgaaattgttgcgtcgctacggtgcggcagtggtggtaatggcctttgacgaacagggacaggccgatactcgcgcacggaaaatcgagatttgccgtcgggcgtacaaaatcctcaccgaagaggttggcttcccgccagaagatatcatcttcgacccaaacatcttcgcggtcgcaactggcattgaagagcacaacaactacgcgcaggactttatcggcgcgtgtgaagacatcaaacgcgaactgccgcacgcgctgatttccggcggcgtatctaacgtttctttcagcttccgtggcaacgatccggtgcgcgaagccattcacgcagtgttcctctactacgctattcgcaatggcatggatatggggatcgtcaacgccgggcaactggcgatttacgacgacctacccgctgaactgcgcgacgcggtggaagatgtgattcttaatcgtcgcgacgatggcaccgagcgtttactggagcttgccgagaaatatcgcggcagcaaaaccgacgacaccgccaacgcccagcaggcggagtggcgcagctgggaagtgaataaacgtctggaatacagcctggtcaaaggcattaccgagtttatcgagcaggataccgaagaagcccgccagcaggctacgcgcccgattgaagtgattgaaggcccgttgatggacggcatgaatgtggtcggcgacctgtttggcgaagggaaaatgttcctgccacaggtggtcaaaagcgcgcgcgtcatgaaacaggcggtggcctacctcgaaccgtttattgaagccagcaaagagcagggcaaaaccaacggcaagatggtgatcgccaccgtgaagggcgacgtccacgacatcggtaaaaatatcgttggtgtggtgctgcaatgtaacaactacgaaattgtcgatctcggcgttatggtgcctgcggaaaaaattctccgtaccgctaaagaagtgaatgctgatctgattggccttagcgggcttatcacgccgagcctggacgagatggttaacgtggcgaaagagatggagcgtcagggcttcactattccgttactgattggcggcgcgacgaccagtaaagcgcacacggcggtgaaaatcgagcagaactacagcggcccgacggtgtatgtgcagaatgccagccgtaccgttggtgtggtggcggcgctgctttccgatacccagcgtgatgattttgtcgctcgtacccgcaaggagtacgaaaccgtacgtattcagcacgggcgcaagaaaccgcgcacaccaccggtcacgctggaagcggcgcgcgataacgatttcgcttttgactggcaggcttacacgccgccggtggcgcaccgtctcggcgtgcaggaagtcgaagccagcatcgaaacgctgcgtaattacatcgactggacaccgttctttatgacctggagcctggccgggaagtatccgcgcattctggaagatgaagtggtgggcgttgaggcgcagcggctgtttaaagacgccaacgacatgctggataaattaagcgccgagaaaacgctgaatccgcgtggcgtggtgggcctgttcccggcaaaccgtgtgggcgatgacattgaaatctaccgtgacgaaacgcgtacccatgtgatcaacgtcagccaccatctgcgtcaacagaccgaaaaaacaggcttcgctaactactgtctcgctgacttcgttgcgccgaagctttctggtaaagcagattacatcggcgcatttgccgtgactggcgggctggaagaggacgcactggctgatgcctttgaagcgcagcacgatgattacaacaaaatcatggtgaaagcgcttgccgaccgtttagccgaagcctttgcggagtatctccatgagcgtgtgcgtaaagtctactggggctatgcgccgaacgagaacctcagcaacgaagagctgatccgcgaaaactaccagggcatccgtccggcaccgggctatccggcctgcccggaacatacggaaaaagccaccatctgggagctgctggaagtggaaaaacacactggcatgaaactcacagaatctttcgccatgtggcccggtgcaagcgttagcggttggtacttcagccacccggacagcaagtactacgctgtagcacaaattcagcgcgatcaggttgaagattatgcccgccgtaaaggtatgagcgttaccgaagttgagcgctggctggcaccgaatctggggtatgacgcggactgattcacaaatctgtcacttttccttacaacaaacagggcgctcaatgagtgccctgtctctttattaatatgaaacacttatactggaaacaggctggaataatcttagccggaaaaacgaatgtcaaaaggcacagtaaagatgccagtcagcgtgtttccggtcctttggtcattcaattgcttcaggaacatataacgataaggagaacctgaactcgtgttaacgctgcttcacctgctttctgccgtcgccctgctggtctgggggactcatattgttcgaaccggcgtaatgcgcgtcttcggcgcgcgtttgcgtactgtccttagccggagcgtcgaaaaaaagccgctcgccttttgcgcggggatcggcgttaccgcactggtacagagcagtaatgccaccaccatgctggtgaccagctttgtcgctcaggatctggtagccctcgcaccggctctggtcattgtgctgggtgcagatgtcgggacggcgctaatggcgcgtattctcaccttcgacttatcctggctgagtccgttacttatttttatcggcgtgatttttttcctcggacgcaaacagagtcgcgccgggcaactgggccgcgtcggtattggtcttgggctgattttgctagcgctggagttgattgtgcaggccgtaacgccgatcacccaggcaaacggcgttcaggtgatctttgccagcctgaccggcgatattctgctggatgcgctgattggcgcgatgttcgccattatcagctactccagccttgctgctgtactgctgaccgcgactctgaccgccgcaggcattatctccttccccgtggcgctctgtctggtgattggtgctaacctcggttccggtctgctggcaatgctcaacaacagtgccgccaatgccgcagcccgccgtgtcgcgctgggtagtctgctgtttaagctggtgggtagcctgattatcctgccgtttgtccatttgctggcagagacaatggggaagttgagtttgccaaaagcggaactggtgatctatttccacgtcttctacaaccttgtacgttgcctggtcatgctgccatttgttgacccgatggcacggttttgcaaaacgattattcgcgatgaaccggaactggatacccagctacggcctaaacatctggatgtcagcgcgctggatacgcccacgcttgctctggcgaacgccgcgcgcgaaaccctgcgcattggcgacgccatggaacagatgatggaagggttgaataaagtgatgcacggtgagccacggcaggagaaagagctgcgtaagctggcagatgatatcaacgttctctacaccgccattaagctgtatctggcgcggatgccaaaagaagagctggcggaggaagagagccgccgctgggcagagatcatcgaaatgagcctcaaccttgaacaggcctccgatatcgtcgagcgcatgggcagcgaaattgctgacaaaagtctggcagcacggcgggcatttagccttgatgggttgaaggaactggatgcgctctatgagcaattgctcagtaatttaaagctggcaatgagcgtgttcttctctggcgatgtcaccagcgctcgtcgtttgcgtcgcagcaaacatcgttttcgcattcttaatcgccgctattcccacgcccacgtcgatcgcctgcatcagcaaaacgtgcagagcattgaaaccagtagcctacatttaggcttactgggagatatgcagcgcctgaacagcctgttttgtagcgtggcttacagtgtgctggaacagccggatgaagatgaaggacgggacgagtattaatattgtgaatcctgtaggcctgataagacgcgtcaagcgtcgcatcaggcactatgaacaagatgccggatcatgcatccggcaattcacttaaaaacggtgaccagcttccagcggaaccgcttcttcaccagccttaaacacataagtggtgttcgggccacccagcgtagcgtgacctttactcactgtgatccagttaccttccggtagaccaataatcgtcagttctggcgcgacgaccagcagttcgcgaatacgctgctcacgggtttcacctttatggccttccggcagcgcgttggtgaagtgcgggttgatttgcagcgggaacagatttagcgcatcgaaaccttgcggatcgacaatcggcatatcgttggtggtacgaatagttgggcaagcaaggttagcgcctgcgctccagccaatatacagagcgccacgtttaaccacgtcagtaattggtgccagcagcccgcgctcgcggcactgtttcagcaactggaaagtattcccgccgccgacaatcacgatctcagcattttcaatcgcggcaacgggatcgacaacgctatgaataccggtgacagaaacacccagcggagcgagaaccgcagccgttttcgctgtgtaatcatcccaggtctgcgttacgccagcgaaagggataaacaccgcactgcggcgaccctgcaactgttcagcaattagcggcagtgcatgttccagccaggctttacccggcagcgtgctgttactcaataaaagcagttccattacttctccggttagtaagaaatcacgggaggcatgctaccactgcgaatttaaccacttactgacatggctcacgatgtcgcacattgcttctggaaagtgatttgagcaggtaacgaattcaagccaatggaaataacaaatagttcgctcatgactattttttatcaacccaaaggtacggtatattccgttttttacaggagaatttatgctgcccgacagtagtgtccgtttaaataaatacatcagcgaaagcggaatttgcagtcgccgcgaagcggatcgctatatcgagcaaggcaatgtgttccttaatggcaagcgagccaccattggcgatcaggtgaaacccggcgacgttgtgaaagtaaacggtcagttgattgaacctcgggaagccgaagatttggtacttatcgccctgaacaagcccgttggtattgtaagcaccaccgaagatggcgagcgcgataacattgtcgatttcgttaaccacagcaaacgcgtgttcccgattggccgcctggataaagactcccaggggctgattttcctcaccaatcacggcgatctggtgaataagatcctgcgtgctggcaatgatcatgagaaagagtatctggtgacggtcgataaaccgattaccgaggagtttattcgcggcatgagtgcgggggtgccaatcctcgggacagtgaccaaaaagtgcaaagttaaaaaagaagcgccgtttgtcttccgcattaccctggtgcaggggctgaaccgtcagatccggcgcatgtgcgagcatttcggctatgaagtgaaaaagctggaacgcacgcgcatcatgaacgttagcttaagcggcattccgctgggggaatggcgcgatttaaccgacgatgagttaatcgacctctttaagctcattgaaaattcctcttccgaggtaaaacctaaagcgaaggccaaaccgaaaacagcgggcatcaaacgtccagtcgttaagatggaaaaaacggcggaaaaaggcggtcgcccggcgtccaacggtaagcgttttaccagcccggggcgtaaaaagaaggggcgctgattaacgcctcagactgatgaaaacggcccaaaagtgcccggacagtcccctcgccccttcgggaaaagggttagggtgaggggaaaattgtgttcacactgacgagtgaaaatctcaggcgttgattgtggattagcgcctgccgcgcgtgctcgtatttgcactccagctaaaactcgcttcaggatccggtttataagcctgctttttcttcaactggcgggcttttttcgcttcagcctcacgctcaaccattaatttatcgatgtaatctttcttaatgctgttggtttcggagttggtcaatacgcgaccatgcgcaatccgcgcccgatccagcagtgttttaagttcacgctgctcgcgttcagtcatctctttttgggtaatacgggggagtgccatgatggtgccctcagtgagccagagagttcagtgtacgggaattcgtttgcgagcagaactgataatattcattttgccttctcttaactatttatctctttcgataattaattagagatgcagataaaaaaattaaaggcaattattctccgataaagacgctggttaacagagtacaggctcgtttattgatgagcatagtgacaagaaaatcaatacggcccgaaatatagcttccaggccatacagtatttactcaaacaaattactatgcagtttttgcaccacctgctcggcatcttcgccgggcaccaggaagcacaggttatggctggatgcgccataacaaatcatgcgaatgttgaacggttccagtacgccgaatacctctttgccaacgccgcaggctttactcaggtcattgccaatcaacgcgaccagcgccagaccttcttccacctccacccgacacagtgcggaaagctccatcagcagagattgcgtcagcaacgtatcgccagtggaggtactaccggtggtatcaagggttaatgccacgctcacttcactcgtggtgattaagtctacgctaatattatgccgcgcgaggatgccgaaaacttccgcgaggaaaccgcgagaatgcagcatattcaggctgtgcaaagtgagcagagtctgattgcgacgaagcgccagagcgcggaacagcggcggattttcagttttattgcacaccagcgtaccacctgcgcgtgggtctttgctggagccgacaaagaccgggatatcgctgcgtactgcgggtagcaacgttgccggatgcagtacttttgcaccaaaagttgccatctctgccgcttcggcaaacgcgatttcatcaatgcgttttgctgcggaaactacgcgtggatcggtggtgtagatgcccgggacgtcggtccagatatcaacacgagatgcgtgtaaagcctccgccagcaaggctgccgtataatcgctgcctccacggccaagcgtcgttgtacgacctttattttcgctaccgataaatccctgggtgatcactaagccttcattgagacgtgggagcagctgcagcgcggccagttccgccagcgcggctatatctggctctgcacgaccaaatcggtcgttggtacgcatcactttacgtacatcaaaccactgtgcctgaacatcgcgttcgcgcaggatctcaacaaacagcagggtgctcatcagctcgccgtggctgaccagctcatctgtcagcgccggagacgttgccagcgccgccgcttctgccagaacagtaatgttctccagcagacgttcaatctcttcacggataacgttcgggtaacgcagacgttccagaatggcaaactggatgttgcggatagcgtcgagtttttcgaatcgctcgccaggttccagtccttcagctaaagcgaccagcagattagtgataccagcagaagcgctgaggacaactaaacgcacgttggcatcagaaagcacaatatcagcgctgcggttcatggcgtcaaaatcagctacgctggtaccgccaaatttggagacaacaatttcagacataactacctcgtgtcaggggatccattttcagccttggcacaagggaagagcggaagacgggtgggcgcagagcgatacttcgctactattttcacccagaagtgctccaccacttgcgaaacgcccgactgcgaacgcttctggtgacaacccaggggattcagcccctgtagccgatgatgaacgtggccagccgttcaatcacctcggcgatgcaccccctcaggtgttatcacaggactggctcctccaacaccgttacttgggcaacgcgcctcttctggcctgcgctagcgcaggtagtacatttataaataaagggtgagcggggcggttgtcaacgatggggtcatgcggatttttcatccactcctggcggtcagtagttcagctaataaatgcttcactgcgctaagggtttacactcaacattacgctaacggcactaaaaccatcacatttttctgtgactggcgctacaatcttccaaagtcacaattctcaaaatcagaagagtattgctaatgaaaaacatcaatccaacgcagaccgctgcctggcaggcactacagaaacacttcgatgaaatgaaagacgttacgatcgccgatctttttgctaaagacggcgatcgtttttctaagttctccgcaaccttcgacgatcagatgctggtggattactccaaaaaccgcatcactgaagagacgctggcgaaattacaggatctggcgaaagagtgcgatctggcgggcgcgattaagagcatgttctctggcgagaagatcaaccgcactgaaaaccgcgccgtgctgcacgtagcgctgcgtaaccgtagcaataccccgattttggttgatggcaaagacgtaatgccggaagtcaacgcggtgctggagaagatgaaaaccttcagtgaagcgattatttccggtgagtggaaaggttataccggcaaagcaatcactgacgtagtgaacatcgggatcggcggttctgacctcggcccatacatggtgaccgaagctctgcgtccgtacaaaaaccacctgaacatgcactttgtttctaacgtcgatgggactcacatcgcggaagtgctgaaaaaagtaaacccggaaaccacgctgttcttggtagcatctaaaaccttcaccactcaggaaactatgaccaacgcccatagcgcgcgtgactggttcctgaaagcggcaggtgatgaaaaacacgttgcaaaacactttgcggcgctttccaccaatgccaaagccgttggcgagtttggtattgatactgccaacatgttcgagttctgggactgggttggcggccgttactctttgtggagtgcgattggcctgagcattgttctctccatcggctttgataacttcgttgaactgctttccggcgcacacgcgatggacaagcatttctccaccacgcctgccgagaaaaacctgcctgtactgctggcgctgattggcatctggtacaacaatttctttggtgcggaaactgaagcgattctgccgtatgaccagtatatgcaccgtttcgcggcgtacttccagcagggcaatatggagtccaacggtaagtatgttgaccgtaacggtaacgttgtggattaccagactggcccgattatctggggtgaaccaggcactaacggtcagcacgcgttctaccagctgatccaccagggaaccaaaatggtaccgtgcgatttcatcgctccggctatcacccataacccgctctctgatcatcaccagaaactgctgtctaacttcttcgcccagaccgaagcgctggcgtttggtaaatcccgcgaagtggttgagcaggaatatcgtgatcagggtaaagatccggcaacgcttgactacgtggtgccgttcaaagtattcgaaggtaaccgcccgaccaactccatcctgctgcgtgaaatcactccgttcagcctgggtgcgttgattgcgctgtatgagcacaaaatctttactcagggcgtgatcctgaacatcttcaccttcgaccagtggggcgtggaactgggtaaacagctggcgaaccgtattctgccagagctgaaagatgataaagaaatcagcagccacgatagcagcaccaatggtctgattaaccgctataaagcgtggcgcggttaatcatcgtcgatatgtaggccggataaggcgttcacgccgcatccggcaaccgatgcctgatgcgacgcggtcgcgtcttatcaggcctacaggtcgatgccgatatgtacatcgtattcggcaattaatacatagcacgattgattaaataaccttaataacaatgccgacgttatgtcggcatttttttatcagataaatccccttgtctgtaatttaacggaaatcataccgtgaggttaatcctaaaatagatttttaatcgttgtttatttcggaaaatacgcagattaattgcttttgtttttattttaagtttatgatttttattgttatttaaatataagttgaaacttatatttgatattcattccaattatcctaaaacgccatcgctaattccccgcgccgtaattcgcatgctttagttgtgtatactcgatcccgcccgaaatgtttttgggtaaatctccattcattcaatgaagggaaattgttatgaaaaaagttctgtatggcatttttgccatatctgcgcttgcggcgacttctgcgtgggctgcacctgtacaggtgggcgaagcggcagggagcgcagcaacgagcgttagcgcggggagttcctccgcgaccagcgtcagcaccgtaagcagcgcggtgggtgtcgcgcttgcggcaaccggtggcggtgatggttctaataccgggaccaccacaaccacgaccaccagtacccagtaataaagtatgtatccccaaaataattcgagtcattgcatctgtggctagaagtatgaagggattaaccataaccacactccggtgtggttattctgcccctctggagaagagtcgtgaagcgacctgcactcattcttatctgcctgttattacaggcctgtagtgccacgactaaagagctgggcaatagtctgtgggacagtctgttcggcacgccaggcgtacagctgacggatgatgatattcaaaatatgccctacgccagccagtacatgcagcttaatggcgggccgcagttatttgtggtgctggccttcgctgaagacggacaacaaaaatgggtcactcaggatcaggctactctcgttacccaacatggccgtctggtgaagactctgctcggcggcgacaacctgattgaagtgaataaccttgctgccgacccgctgattaaacccgcacaaatcgttgatggcgcaagctggacgcgcacgatgggctggaccgagtaccagcaggtacgctacgccaccgcacgcagtgtcttcaaatgggatggcaccgataccgtcaaagtcggcagcgatgaaaccccggttcgcgtgctggacgaagaagtctccaccgaccaggcgcgctggcataaccgctattggatcgacagcgaagggcaaattcgccagagcgaacagtatctcggcgcggattattttccggtgaaaaccactctcatcaaggcggcaaaacaatgattaaacaaactattgtcgcgttgcttttgagtgtgggagcgagtagcgtcttcgcggcaggaaccgtcaaggtgttcagcaatggcagcagtgaggccaaaacgctaacgggcgcagagcatttaatcgatctggtaggccaaccgcggctggcaaacagctggtggcccggtgcggtgattagcgaagagctggcaacggcggcagcattgcgtcagcagcaggcgttgctgacacggctggcagaacagggcgcagattccagcgccgacgatgccgctgcgattaacgccttacgccagcaaattcaggcgttgaaagtgacgggcaggcaaaaaatcaatcttgatcccgatatcgtccgcgttgccgaacgcggtaacccgccgttgcagggcaactacacgctgtgggtcggaccaccgccgtccacggtcacgttgttcgggcttatcagccgtcctggcaagcagccattcactccaggtcgcgacgtggcgagctatctctctgaccagagcctgctcagcggtgcggatcgcagctacgcgtgggtggtttacccggacggacgcacgcaaaaagcgccggtggcttactggaacaagcgtcacgtagagccgatgcccggcagcattatttatgttggcctcgcggactccgtctggagtgagacgcctgatgcccttaacgccgacattcttcagactctgacgcagcggatacctcaataatgaaaaaaagacatctgcttagcttactggcgctgggcattagcacagcttgctacggcgaaacatatcctgcgcccattggtccgagccagagcgatttcggtggcgtaggattattacaaacgcccaccgcgcgtatggcacgggaaggggagttgagtctgaactatcgcgataacgatcagtaccgttattacagtgctagtgtgcaactcttcccgtggctggaaacaacgctgcgctacaccgacgtgcgcacccggcagtacagcagcgtcgaagcgttctctggcgatcaaacgtataaagataaagccttcgatctcaaactgcgtttgtgggaagagagttactggctgccgcaagtggcggttggtgcgcgggatatcggcggtacggggctgtttgatgcggaatatcttgttgccagcaaagcctgggggccgttcgattttacgctcggcctgggctgggggtatttgggcaccagcggtaatgtgaaaaatccgctctgtagtgccagtgataaatattgctatcgcgataacagctacaaacaggcgggatctatcgacggtagccagatgttccacggtcctgccagtctgtttggcggcgtggaataccagacgccctggcaaccgctgcgcctgaaactggagtatgaaggcaataattatcagcaggattttgccgggaagctggagcaaaaaagtaagtttaacgtcggtgcgatttatcgcgttaccgattgggccgacgttaaccttagctatgaacgtggcaacacctttatgtttggcgttacgttgcgcaccaactttaacgatctgcgcccgtcttacaacgataacgcccgcccgcaatatcaaccgcagccgcaggatgccattttgcagcatagcgtggtggcgaatcagttaacgctgttgaaatacaatgccggacttgccgatccacagatccaggcgaaaggcgatacgctgtatgttaccggcgagcaggtgaaatatcgtgatagccgcgaagggatcatccgtgcgaatcggatcgtgatgaacgatctgccggatgggatcaaaacgatccgcattacggaaaatcgccttaacatgccgcaggtgacgacggaaaccgatgtcgccagcctgaaaaatcatctcgccggagagccgttgggccacgaaacgacgctggcgcaaaaacgcgtcgagccagtggttccgcagtccaccgagcagggctggtatatcgacaaaagtcgctttgatttccatatcgatccggtgctgaaccagagcgtcggtggcccggaaaacttttacatgtatcagctgggcgtgatgggaacggcagatttgtggctgacggaccatctgctgaccaccggcagcctgtttgcaaatcttgccaacaactacgacaagtttaactacactaatcctccgcaggacagccacttaccgcgcgtgcgtacccatgtgcgcgagtatgtgcagaacgatgtctatgtgaataacctgcaagccaactacttccagcatctgggcaacggcttctacggtcaggtctacggtggttatctcgaaaccatgtttggcggtgcgggggcagaagtgttgtatcgcccgctggacagcaactgggcgtttggtctggatgccaactacgttaaacagcgcgactggcgtagtgcaaaagatatgatgaaattcaccgactacagcgtgaaaaccggacatctgaccgcctactggacgccatctttcgctcaggatgtgttagttaaagccagcgtcgggcagtatctggcaggggataaaggcggcacgctggagatcgccaaacgctttgatagcggcgtggtggtgggtggctatgccacgatcactaatgttagcaaagaggagtacggcgaaggggacttcaccaaaggcgtgtatgtcagcgtaccgttggatctcttcagctctggcccgacacgcagccgtgcggcgattggctggacgccgctgacgcgtgacggtggtcagcaacttgggcgtaagttccagttgtatgacatgaccagcgaccgtagcgtcaatttccgctaagtcatgggaaaggtgccagttttcgcactcactggcaccttcattcttaatggcctgtcgagccatcaggaacgcagttcactcccggtttgcgatctggtgtgtaaaggcgaaaacattctgtcttcctgtccgtcgatatcggttgcaggtctggttgcctgagcgactgggccatcattgggctggagacattgctttgcggtaggtcggctttatcagcagtaccgagcggaccagcataagcaggaagaacagagactgataacatcaaagcagcaaaataaggcttcatttttaccacctttatcaggttacgtttcatttgttccagaggaacattgtcgatttttcgcgcattgctggtggctgggaatcacctgaatgggtgatttttgaattaccggctttggtgcggtttgtcttgccggatgcgccgccaggcgcggcttatccggcctacgggtaggtatatccggctttggtggaggcgcgctccaaatccaggttgaacaaaacatacacaaaaaatatagatctccgtcacatttttgcgttatacaggaagctcgccactgtgaaggaggtactgctatgacgagtctctctcgtccgcgcgtggagtttatctccaccattttgcagaccgtactcaatcttggcctgctgtgcctcggcctgattttggttgtcttcctcggcaaagaaacggtgcatctggctgatgtgctgttcgcgccagaacaaaccagcaaatatgagctggtagaaggactggtggtttactttctctatttcgaatttatcgcgctgattgtgaagtactttcagtccggttttcacttcccgctacgttactttgtctatattgggatcaccgccattgtgcgcttgatcatcgtcgatcataaaagcccactggatgtgttgatctacagcgctgcgatcctgttactggtgatcaccctgtggctgtgtaatagcaaacggctgaagcgggagtaaaaagtcagcacgccgaaatggcgcggcgtgctggacaggaagattacagcgtagcagtttgttgtgttttcttcgtttccggttcccagagcgcttccagctcctcaagggttttacctttggtttccgggacaaatttccacataaacagtgctgccagaacgcccatacaaccgtaaatccagtaggagaaaccgttgtggaaatgggccaccagccaggagtttttgtccatcatcgggaaggtccaggagacgaagtagttcgccagccactgggccgccaccgcgattgccagcgctttaccacgaatagcattcgggaagatttcgctcagcagtacccagcataccggaccccaggacatggcaaaggcggcaacatagaacagcatgctcagtagcgccacaatacccggtgcctgagtgtaaaacgcggtaccgaggctaaacataccgattgccattccgagtgcgccgataatttgcagtggcttacgaccaaatttatccaccgtcataattgccagaacggtgaaggtgaggttgataactccgacaataatggtctgcaacagcgcgatatccgtgctggcccccagcgttttgaacacttccggcgcgtagtacagcaccacattgatgccgacaaattgctggaagatggagagcattacgccgattacaatcacgcccacgccaaacatcagcagacgaccaccggttttgcggccatgatccagggagtgtttaatttcctgtactgcctgagttgcaagcgtgttgcccataattttgcgcaggataccttccgcctgttcttgcttgccgcggctcatcagccagcgaggactttctggcacggtatacagcagcattaagaacagcagtgcagggatacattcgctggcaaacatataacgccagccgtcagtattcagccagctggcatcaccggaacgggcaataaaatagtttacgcagtaaactaaaagttgcccgaaaataatcgcaaactggttaaaagagaccagtttcccgcgaatatgagctggagccagttccgcaatatacattgggctgagcatactggctaaaccaacgccaataccgccaataatgcgataaataacaaattccgggacataacctgccagataaacaggcacagtgttgtccgggtttatagaggtaaaaccaagttctggccaggcagaacctacaccagaaataaaaaacaggacagcagcaatcttaagactatcacgacgaccgaagcggttactgcaataaccaccgagggcaccgccgatgatgcaaccaatcagagcgctggccacgcaaaaccctaacagggagttggcagcggattcacttaagttttgtggagcaacaaagacggtattgagactctcaacagtaccggaaataacggcggtgtcgtagccaaataataaaccacctaatgtagcgactaaggtaatgctaaatatataactggaattatactgggtattcattcagacctgccttagaccattctgatcttttatcagtgcattgatgttggaattgtcaggcagttaaggcaattatcattttttacaatgcgtttacgtaatgtcttttctgtgatcttaattgtgataattatccaaaattgataaaaacaatactattgccgtgactcagagcacgaaagagaattatcgtaagtgggaaaacaaataacgtaaaaataataagctctatgatggaaatattaaccggcgaacgattcagattgcagacgaaagaaaaaaaggcgctccgtggagcgccgaataacagtcacaagttgggataacgtaagttgagggtgcagcggcataacattggcagaacaacatctttaacctttcacaccacctgccgtcaggccgttgaccagccagcgttgagccagcaagaagacgatggtgatcggtaatgcagacatcacggcagcggcggcaaagtcaccccacaggtagttttgcgggttgaggtattgctgcatccccacggccagggtgtagctgtttacgtcacgcagtaacaggctcgcgaccggaacttcagtaatggcagcgataaagctcaggatgaataccaccgccagaatcggtacactcagcggcaacaggacaaggcggaaggcctgccacggtgtcgcaccatccagcgcagcagcttcttccaggctactgtcgatggtttcgaaatagcctttgatggtccagacatgcagcgcaatcccacccagatacgcgaaaattacgccgccgtgagtattcaggccaatgaatggaatgtactcacccagacgatcaaacaacgcatacaacgcgaccagactaagtactgccgggaacatctggaaaatcagcattcctttcagcagcgtcgctttgcctggaaagcgcatacgggcgaaagcgtaggcgcaggtggtggagagcgccacaatgccaatcgcggaaatcccggcgacctttacgctgttccacagccacagcagtaccgggaatggcggtggcgtaatgcgaccatcagcctgttcaacgctaaaacctaacgccagtttccagtgatcccaggagatttgctccgggatcaggctgccggtcgcaaagtttccctgacgcaggctgatagcgacgaccatcagcagcgggaacataatcgctgcgataaaaagtagcagtagcaggtgagtaataaataaacgagctttttggcttttcggttggaccattgccatttttgttatctcccttaatcaaacttcattcgcgtggctttcaggttcactatcgccagcgcacccaccagcaggaagatcagcgtggcaattgctgccgccagaccgaagtcctgacccccgccgccttcaaaagcgatgcggtaggtgtagttaacaagcaggtcggtataaccggctggcgtggtcgtgccaagacgatccgggccgccgttggttaacagttgaatcagcacgaagttgttaaagttaaaggcgaagctggcgatcatcagcggcgtcagcggtttaatcagcagcggcagcgtaatcttaaagaagttctggaacggacctgcgccatccattgcactggcttcatacaaatcgtccggaatcgctttcagcaagcccatgcagaggatcatcatgtacggataacccagccaggtattgacgataattagcatcgtgcgggcggtggtcggatcgctgaaccaggcgggcttcacgccaaacagcgcgctcaacatcatgttgatttcaccgaagctctggttaaacaaccctttgaaaatcaagatactaatgaagcttggcaccgcgtagggcagaatcagcaggacgcgatagaccgctttgccgcgcaacgcttcccactgcaccagacacgccagaaccatgccgaccgccaccgttaaaaagacagtgatcaggctgaacaccacggtccagacgaaaatggcgaggaacggtttctgaatgccttcgtcggtaaagacgcgggtaaagtttttccagccggtggtcacggtgtaaccggggcttagcttttcatcaccccagttgccgtcggcggtaatggactggtaaaagccaatttggttattcggacgatatttcacgccgctctgattattcgtcaacgtgccgtcaccgtcgagtgtgtagagcggctgcgtgccagaaaactggcgcagggagctcatcatcactttgttgccatccggcagaatggcggtaatgtcactcagcgcctgacgattctgggtaatcacgcgcagattcgcgcgttcgccttcgggctgggcggtcgtttctttcagttgcagtttttgctcgccgccaaatttaaaagcgtcggagaggtaatttttgccggtttcgccgtcgctgagcgccagttgccactcatcgcccgccgggtaaagaccaaagttataggttttgcctgcttgccaggagcgatctaacaacacttcctgcgcacgttcaaaagtcagctggttagtgctgctgtagttggtgaaggcaatggcgatggtgcagaccagagggaagaggacgaataatcccattccagccattcccgggtaaacatagcgccaggcgtaggctttacgattggcgaaaatatacagccccgcactactcaatatcagcgtggtaatggcgaacaggtattccccttgtgcgtacattaaaacaacaaggtaacccaccagcaggccgagcagacctagcacactccatttcagcgcgtcgctttgccaccaatgtttctttttaatgacatccatggggttcttcctcattccaggacggataaggctttcacgccttatccgacaacaactgcctgatgcgacgctgacgcgtcttatcaggcctacatacgtttcggttttgtaggccggacaaggcgttcacgccgcatccggcatttcacagcattacttggtgatacgagtctgcgcgtctttcagggcttcatcgacagtctgacgaccgctggcggcgttgatcaccgcagtacgcacggcataccagaaagcggacatctgcgggatgttcggcatgatttcacctttctgggcgttttccatggtggcggcaatacgtggatctttcgccaactcttcctcgtaagacttcagcgctacggcacccagcggtttgtctttattaaccgcttccagaccttcatcagtcagcagatagttttcgaggaactctttcgccagctctttgttcggactggcggcgttaatacctgcgctcagcacgccaacgaacggtttggatggttgacccttgaaggtcggcagtaccgttacaccataattcactttgctggtgtcgatgttggaccatgcccacgggccgttgatggtcatcgctgtttcgcctttattaaaggcagcttctgcgatggagtaatcggtgtctgcattcatgtgtttgtttttaatcaggtcaaccaggaaggtcagacccgctttcgcgccagcgttatccacgcccacgtctttaatgtcgtacttgccgttttcatacttgaacgcataacccccgtcagcagcaatcagcggccaggtgaagtacggttcttgcaggttgaacatcagcgcgctcttacctttcgctttcagttctttatccagcgccgggatctcttcccaggtttttggcgggttcggcagcagatctttgttataaatcaggcttaacgcttcaacagcgatcgggtaagcaatcagcttgccgttgtaacgtacggcatcccaggtaaacggatacagcttgtcctggaacgctttgtccggggtgatttcagccaacaggccagattgagcgtagccaccaaagcggtcgtgtgcccagaagataatgtcagggccatcgccagttgccgcaacctgtgggaatttctcttccagtttatccggatgctcaacggtgactttaattccggtatctttctcgaatttcttaccgacttcagcgagaccgttatagcctttatcgccgttaatccagattaccagtttaccttcttcgattttggcgagagcgctggcggaaaacatcatcgtcgttaatgcggataatgcgaggatgcgtgcacctgtttttattttcataatctatggtccttgttggtgaagtgctcgtgaaaacacctaaacggactctagtttctttatacggcaacctctttccatcctccttgcccctacgccccaccgtcgctttgtgtgatctctgttacagaattggcggtaatgtggagatgcgcacataaaatcgccacgatttttgcaagcaacatcacgaaattccttacatgacctcggtttagttcacagaagccgtgttctcatcctcccgcctcctcccccataaaaaagccagggggtggaggatttaagccatctcctgatgacgcatagtcagcccatcatgaatgttgctgtcgatgacaggttgttacaaagggagaagggcatggcgagcgtacagctgcaaaatgtaacgaaagcctggggcgaggtcgtggtaagcaaagatatcaatctcgatatccatgaaggtgaattcgtggtgtttgtcggaccgtctggctgcggtaaaagcactttactgcgcatgattgccgggcttgagacgatcaccagcggcgacctgttcatcggtgagaaacggatgaatgacactccgccagcagaacgcggcgttggtatggtgtttcagtcttacgcgctctatccccacctgagtgtagcagaaaacatgagttttggcctgaaactggctggcgcaaaaaaagaggtgattaaccaacgcgttaaccaggtggcggaagtgctacaactggcgcatttgctggatcgcaaaccgaaagcgctctccggtggtcagcgtcagcgtgtggcgattggccgtacgctggtggccgagccaagcgtatttttgctcgatgaaccgctctccaacctcgatgctgcactgcgtgtgcaaatgcgtatcgaaatctcccgtctgcataaacgcctgggccgcacaatgatttacgtcacccacgatcaggtcgaagcgatgacgctggccgacaaaatcgtggtgctggacgccggtcgcgtggcgcaggttgggaaaccgctggagctgtaccactatccggcagaccgttttgtcgccggatttatcggtagcccaaagatgaacttcctgccggtaaaagtgaccgccaccgcaatcgatcaagtgcaggtggagctgccgatgccaaatcgtcagcaagtctggctgccagttgaaagccgtgatgtccaggttggagccaatatgagcctgggtattcgcccggaacatctactgccgagtgatatcgctgacgtcatccttgagggtgaagttcaggtcgtcgagcaactcggcaacgaaactcaaatccatatccagatcccttccattcgtcaaaacctggtgtaccgccagaacgacgtggtgttggtagaagaaggtgccacattcgctatcggcctgccgccagagcgttgccatctgttccgtgaggatggcactgcatgtcgtcgactgcataaggagccgggcgtttaagcaccccacaaaacacacaaagcctgtcacaggtgatgtgaaaaaagaaaagcaatgactcaggagatagaatgatgattactctgcgcaaacttcctctggcggttgccgtcgcagcgggcgtaatgtctgctcaggcaatggctgttgatttccacggctatgcacgttccggtattggttggacaggtagcggcggtgaacaacagtgtttccagactaccggtgctcaaagtaaataccgtcttggcaacgaatgtgaaacttatgctgaattaaaattgggtcaggaagtgtggaaagagggcgataagagcttctatttcgacactaacgtggcctattccgtcgcacaacagaatgactgggaagctaccgatccggccttccgtgaagcaaacgtgcagggtaaaaacctgatcgaatggctgccaggctccaccatctgggcaggtaagcgcttctaccaacgtcatgacgttcatatgatcgacttctactactgggatatttctggtcctggtgccggtctggaaaacatcgatgttggcttcggtaaactctctctggcagcaacccgctcctctgaagctggtggttcttcctctttcgccagcaacaatatttatgactataccaacgaaaccgcgaacgacgttttcgatgtgcgtttagcgcagatggaaatcaacccgggcggcacattagaactgggtgtcgactacggtcgtgccaacttgcgtgataactatcgtctggttgatggcgcaagcaaagacggctggttattcactgctgaacatactcagagtgtcctgaagggctttaacaagtttgttgttcagtacgctactgacagcatgaccagccagggtaaagggctgagccagggttctggcgttgcatttgataacgaaaaatttgcctacaatatcaacaacaacggtcacatgctgcgtatcctcgaccacggtgcgatctccatgggcgacaactgggacatgatgtacgtgggtatgtaccaggatatcaactgggataacgacaacggcaccaagtggtggaccgtcggtattcgcccgatgtacaagtggacgccaatcatgagcaccgtgatggaaatcggctacgacaacgtcgaatcccagcgcaccggcgacaagaacaatcagtacaaaattaccctcgcacaacaatggcaggctggcgacagcatctggagtcgcccggctattcgtgtcttcgcaacctacgccaagtgggatgagaaatggggttacgactacaccggtaacgctgataacaacgcgaacttcggcaaagccgttcctgctgatttcaacggcggcagcttcggtcgtggcgacagcgacgagtggaccttcggtgcccagatggaaatctggtggtaatagcaaaacctgggccggataaggcgtttacgccgcattcggcaaccaacgcctgatgcgacgcttgcgcgtcttatcaggcctacaacggctgtcaaatgtaggccggataaggcgtttacgccgcatccggcataaaaacaggttgtcattatctgaaaggggcgaaagcccctctgattatcgggtttagcgcgctattgcctggctaccgctgagctccagattttgaggtgaaaacaatgaaaatgaataaaagtctcatcgtcctctgtttaagtgcagggttactggcaagcgcgcctggaattagccttgccgatgttaactacgtaccgcaaaacaccagcgacgcgccagccattccatctgctgcgctgcaacaactcacctggacaccggtcgatcaatctaaaacccagaccacccaactggcgaccggcggccaacaactgaacgttcccggcatcagtggtccggttgctgcgtacagcgtcccggcaaacattggcgaactgaccctgacgctgaccagcgaagtgaacaaacaaaccagcgtttttgcgccgaacgtgctgattcttgatcagaacatgaccccaagtgccttcttccccagcagttatttcacctaccaggaaccaggcgtgatgagtgcagatcggctggaaggcgttatgcgcctgacaccggcgttggggcagcaaaaactttatgttctggtctttaccacggaaaaagatctccagcagacgacccaactgctcgacccggctaaagcctatgccaagggcgtcggtaacagcatcccggatatccccgatccggttgctcgtcataccaccgatggcttactgaaactgaaagtgaaaacgaactccagctccagcgtgttggtaggacctttatttggttcttccgctccagctccggttacggtaggtaacacggcggcaccagctgtggctgcacccgctccggcaccggtgaagaaaagcgagccgatgctcaacgacacggaaagttattttaataccgcgatcaaaaacgctgtcgcgaaaggtgatgttgataaggcgttaaaactgcttgatgaagctgaacgcctgggaagcacatctgcccgttccacctttatcagcagtgtaaaaggcaaggggtaattacgccccacagtgctgattttgcaacaactggtgcgtctcctggcgcacctttttttatgcttccttcctgggatatgagcgattttttatagtaactcacttcttcttcactaagaatatccattatctcaatgccttatcagagattcttttcctttcgccggtagtgtctggacattcaggctacttttccaggttattttatttctgttatgcagaggttttatgataagtcatatcctaaattctggcggcaataactctttgatgaaacatgatgtggtgcaaggaaataatatagtagatcttgatttactacgtaatttaaatggggtgccaggtttaaacagagataactttatttatatcagcaatattttttcaaatataaaacaacggaacgaaaaaatcatgcaataaatatgtttcgtgaagtctcaatcagtaatgatactataagtgtaaaattctacagaaatgaaaaaaattgaatgcgcttgcaattttctgatggataaagatgcgcaggggtatatcgacctgtctgatttggatttaacaagttgtcattttaaaggtgacgttataagcaaggtgtcttttttaagtagtaatctacaacatgtaacattcgaatgtaaagaaattggggattgcaattttactactgcaatagttgataatgtcatatttagatgtcgacgtttacacaatgtgatttttatcaaagcgagtggtgaatgtgtcgatttcagcaaaaatattcttgatacagttgacttcagccagagtcaacttggtcatagtaattttcgcgaatgtcagattagaaatagtaacttcgataattgttatctttacgctagccacttcaccagagcagagtttctgtctgccaaagaaataagttttattaaaagcaatttgacagctgttatgtttgattatgtgcgaatgagcacagggaattttaaagattgcattacagaacaattggaattaactattgattatagtgatatattttggaatgaagatctcgatggttatatcaataacattataaaaatgattgatacattgccagataatgcaatgatattgaaatccgttctggccgtaaaactggtgatgcaattaaaaatacttaatattgttaataaaaactttattgagaatatgaagaaaatatttagccattgtccttatataaaagatcccattatacgcagttatatccattctgatgaagataacaagttcgatgattttatgcgtcaacatcgattcagtgaggtgaatttcgatacccaacagatgatcgattttattaacagatttaatacgaataaatggctaattgataaaaataacaatttttttatccaacttatcgatcaggccttacgaagtacggatgatatgatcaaagcaaatgtttggcatctttataaagagtggattcgtagtgatgatgttagtcctatatttatagaaactgaagataatttaagaacctttaacacgaatgaattaacacgaaacgataatatctttatcctgttctccagtgtcgatgatgggccagttatggtggtaagctcccagcgcttacatgatatgttgaatcctacaaaagataccaattggaattccacgtatatctacaaatccagacatgagatgttgcctgttaatcttactcaggaaacacttttcagctccaaatctcatggtaaatatgcgcttttccccatttttactgcgagttggcgagctcatcgtataatgaataagggtgtttaagtaaaggaaaacatcaccgttcctggcatcctggacggtgatgcccctacggttgccctcgccagcacgggcatcggtaaagcgtaaggttcaacatcgttttaccacttcatgcgattgttgcgtttttgttgcgtattagatcacttaatttgctttacatctcccgtaaacacttttctgcgatacaatgcctttacgttatgtaacggagagttcggcatgagtcaccccgcgttaacgcaactgcgtgcgctgcgctattgtaaagagatccctgccctggatccgcaactgctcgactggctgttgctggaggattccatgacaaaacgttttgaacagcagggaaaaacggtaagcgtgacgatgatccgcgaagggtttgtcgagcagaatgaaatccccgaagaactgccgctgctgccgaaagagtctcgttactggttacgtgaaattttgttatgtgccgatggtgaaccgtggcttgccggtcgtaccgtcgttcctgtgagtacgttaagcgggccggagctggcgttacaaaaattgggtaaaacgccgttaggacgctatctgttcacaagtagcacattaacccgggactttattgagataggccgtgatgccgggctgtgggggcgacgttcccgcctgcgattaagcggtaaaccgctgttgctaacagaactgtttttaccggcgagtccgttgtactaagaggaaaaaaatatggagtggagtctgacgcagaataagctgctggcgtttcatcgcttaatgcgtacggataagccaattggcgcgttactgctgctctggccaacattatgggcgttgtgggtggcgacaccgggcgttccccagctctggatcctggcggtgtttgtcgcgggtgtctggctgatgcgcgctgccggatgtgtggtgaatgattatgctgaccgcaagtttgatggtcatgttaagcgcacggcgaaccgaccacttcccagcggcgcggtaacagagaaagaggcgcgcgcgctgtttgtcgtgctggtactgattagctttttactggtgctgacgctgaatacgatgaccattctgttgagcattgccgcgctagcgctggcgtgggtgtacccgtttatgaagcggtatacccatctaccgcaagtggtgctgggcgcggcgtttggctggagcattccaatggcttttgccgctgtgagtgagagcgtgccattgagttgctggttaatgttcctcgccaatattctctgggcggtggcttacgacacgcagtatgcgatggttgaccgcgatgatgatgtgaagattggcattaaatccacggcaatcctgttcggccaatacgataaattgattattggtattttgcagattggcgtactggcactgatggcgatcatcggtgagttaaatggcttaggctggggatattactggagtattctggtggctggcgcgctgtttgtttatcaacaaaaactgattgccaaccgcgagcgtgaagcctgctttaaagcatttatgaataataactatgttggtctggtactatttttagggctggcaatgagttactggcatttctgatgatgtaaaaaagccggatgatcatccggctttcttctgggttgcctgatgcgcggcgcttctcaggcctacacaacacatcgcaatttattgaatttgcagattatggaaggccggataaggcgttttcgccgcatccggcaattctctctgattacccttcgccctgcgtcgcactctcaatcgtcaaacgcacgtcacttgtaatcaactccgccagcaactgataaaccttcatcgtttctgccggttcggcatcgccgctatcgctgatatacccttcatcacgcagtgtcagcaccagagaactgaacaccgccttgtcgaagaactccggcgcgttgatgccgtgcagcacggagagacgttgcgcgacggtgcggctctctttctccagcgtaccgcggttgatgctcgggttggcactcaacaaccagaaggtgatggcataacgttgcagcgtttcgcgcgcgcctgcggccagcagctgtagcgtgcgagaatgcgccgggttgatatgcaactcatcatcttgcagggtaatcagcccctgacgttgcatctcatttgccagcgcatcaataacgtccggcaactcgtcgcgatcccagcgcaggaacagctccgctttcagcattgggtaaagcacattgacgtgctccatcaatacgtcgcgggagatgtggcgatgctgggtgacgattgccgccatcaggctaggcagcaccaacatatgcgcaatgttgttgcgatagtaggtcatcagcaccgcttgctcgcgcggcagaatgatgatgtcgccgattgtgtctttctcgacttcaaacttgttcatttgcagcgcgtgatcgataagctcgctggcgctggcactaggaacggtagagtccgtggagtagggcacgttgcgcatcagatccaggtagcagttgagttgctcggttaactgctcgcgggtgagactgcgctgacgacttgccagtagcgcagtacagcacaggttcatggcgtttgccgcgcctgcgttgttaatgcgtaccatcagatcggcagcaatattattgaccgtcggcgttaaccatgccggacgcaccgcttcgatgggatcgatagattcacgccagtcaggtacatgctggttaaggtaggtcatcaacggcattggttcaccgaagttgacgtaaccctgaccgagattacgcagcttgcttaaaccgcgcagcatctgcggcaggctctctttctctttcgtcgcgccgcgcagttctttggcgtaagtacccacttccatgacgtgctcataaccgatatagatcggaatcagcgtaatcggacgcgtgccgccacgcagcatcgcctgaatggtcatgctcagcgtaccagttttcggatccagcaaacgccccgtacgggaacgaccgccttccacgaagtactcgacggaataaccacggctgaacagttcgccgagatactcccggaaaacggtggaataaagtttattgcctttaaacgtacggcgaataaagaacgcccccagacggcggaaaatcggcccggcaggccagaaattcaggttgatcccggcggcgatatgcggcggcaccagcccctggtgatacagcacgtaagaaagcagcaggtagtccatgtgactgcggtggcaaggcacatataccagctcatgaccgtcgtgggccagctggcgaacgcgctcagcgttatggacgttgatgccctggtaaagtcggttccaggtgaagcccagaatacggtcagtcaggcgaatcatctcgtaagagaaattcgccgcaatctcttccatcagtgcaatcgcgttctgctgcgctttttcatgggagatttttttgctgcgcgcttcatcttctaccgctttggcaatggcgcgggaggcgagcagcttattaaacagatcctgacgagcaggcaaacgtgggcctacggcagccagacgttgacgggcaaagtgcatacgcgccacgcgcgccagtttctgagcgatagttttatccgtgccgtgttcatccgccatacggcgcaggctaacactcgggctgaaacgcacaaaactgtcgcgaccgagccacagtacagcgaaaaatttctgtacgccgttaagcatacgcagcggcgggttcacttcgcctttttcacgccccggcgcgcgaccaaacatcacgctcactggcaccatctgcacatccagatttgggttgctacggtgcaaatcgagatagtcgtggaacagcttaatagactcttctttcggcgtgtaataggtgaacacacgcggcccgccgtgaatgaacacatagcgcggcagtagcgtgccgtcgatttccagcggctctaacgggtcaggcaagtcatgtgccagacactgggcgcgcaacgtcagcaaatctgctttgctgttgtacggtaaaacgtacataattggacgagaggtatccagccccagttccggggcaggatctgccggaatagacttgctttttaccaggatgcttaatggtaaattcagtaatttgtagtaaattcgtggccagccggacataaacgatgtaaagcctctggttaataatgcaaatgcgcggcaaggatagcagaaagtcatgggaaattctgtggtatccgctcatgtttcgcgcggcgctacgcaaacccgaatcatcggatttaacggtacactgatattgacgctcataatgtaaaaaggttctttcaatggccaataataccactggattcacccgaattatcaaagctgctggctattcctggaaaggtttacgcgctgcatggatcaacgaagcggcattccgtcaggaaggcgtagcggtattgttggcggtggtcatcgcctgctggctggatgtggacgcgattacccgcgtgctgcttatcagctccgtgatgctggtgatgattgtggaaatcctcaatagcgccatcgaagcagtggttgaccgaattggctctgaataccatgagctttccggacgcgcaaaagatatgggatccgctgcggtgctgattgccattatcgtcgccgtgattacctggtgcattctgttatggagccattttggataacccttccagaattcgataaatctctggtttattgtgcagtttatggttccaaaatcgccttttgctgtatatactcacagcataactgtatatacacccagggggcggaatgaaagcgttaacggccaggcaacaagaggtgtttgatctcatccgtgatcacatcagccagacaggtatgccgccgacgcgtgcggaaatcgcgcagcgtttggggttccgttccccaaacgcggctgaagaacatctgaaggcgctggcacgcaaaggcgttattgaaattgtttccggcgcaagtcgcgggattcgtctgttgcaggaagaggaagaagggttgccgctggtaggtcgtgtggctgccggtgaaccacttctggcgcaacagcatattgaaggtcattatcaggtcgatccttccttattcaagccgaatgctgatttcctgctgcgcgtcagcgggatgagcatgaaagatatcggcattatggatggtgacttgctggcagtgcataaaactcaggatgtacgtaacggtcaggtcgttgtcgcacgtattgatgacgaagttaccgttaagcgcctgaaaaaacagggcaataaagtcgaactgttgccagaaaatagcgagtttaaaccaattgtcgttgaccttcgtcagcagagcttcaccattgaagggctggcggttggggttattcgcaacggcgactggctgtaacatatctctgagaccgcgatgccgcctggcgtcgcggtttgttttagttctctcttcatcaggcttgtctgcatggcattcctcactagttctgataaagcactctggcatctcgccttacccatgattttctccaatatcaccgttccgttgctgggactggtcgatacggcggtaattggtcatcttgatagcccggtttatttgggcggcgtggcggttggtgcaacggcgaccagctttctctttatgctgttgctgtttttacgcatgagcaccaccgggctgactgcgcaggcttatggtgccaaaaatcctcaggcattagcccgtacgctggtgcaaccgttgctgttggcgttgggggctggggcgttaattgcgctgctgcgtacgccgattatcgatctggcgctgcatattgttggcggtagtgaggcagtcctggaacaggcgcggcgctttcttgaaatccgctggttaagcgcaccggcgagcctggcgaatctggtattactcggttggttactcggcgtgcaatatgcccgtgcgccagtaattttgttagtggtcggcaatatcctcaacattgtgctggatgtctggctggtgatggggctgcatatgaacgtgcagggcgcggcgctggcgacggttattgcggaatatgcaacattgctgattggtctgctaatggtgcgtaaaatcctcaaactacgcggaatttccggcgaaatgctgaaaactgcctggcgaggaaacttccgtcgcttgctggcgcttaaccgcgatatcatgctgcgtagcctgttgttgcaactctgtttcggcgcgatcaccgtacttggcgcgcgactggggagtgacattatcgctgttaacgcggttctgatgacgctactcacctttaccgcctatgcgctggatggttttgcctacgcggttgaagcgcactccggtcaggcatacggtgcgcgcgacggtagccagttgctggatgtctggcgggcagcgtgccgccagagcgggatcgtagcgttactgtttagcgtggtttatttgctggctggggaacacatcattgcgttactgacgagcttaacccagattcagcagctggctgaccgctatcttatctggcaggtgattttgccggtggttggcgtctggtgttatctgctggacggcatgtttataggcgcaacgcgtgccaccgaaatgcgtaacagtatggcggtggccgccgcaggttttgcgctgacgctccttacgctgccgtggctgggtaatcatgctttgtggctggcattaaccgtctttctggcgttgcgcgggctttctctggcggctatctggcggcgtcactggcgcaatggtacctggtttgccgcaacgtgacggttaaaaattctgaataaataatcctaagccaaattgctgactacacttaatctcacgttcagaagaaaagtgaacgtactctcattcacaacctaacgatgaggtcttgattatgaataaagatgaagccggcggtaactggaaacagtttaaaggtaaagtgaaagagcaatggggcaaactgaccgatgatgatatgacgatcattgaaggtaaacgtgatcaactggtcggtaaaatccaggaacgttatggttatcagaaagatcaggcagaaaaagaggtcgtggattgggaaacccgcaatgaatatcgctggtaattaatccctcctgcccgacgtgtacaaggatgtacgccctcttaacgcggtttctttttcacctgcacagagtgatcatgctggcactgttcaggatgacgacacgcttccacttctacacatgccgcacagagcccatgtgcttcaatcacattatgccgcagggcaaaccccatttttgccgccagcgtatgcataatgtcttccacgccttctgcacactcttctttcactgcgccgcagcgatcgcaaataaacatggcactcgtatgggtgggctgatcgaacagatgacagagcacataactgttggtggattccaccttatgcacaaaaccttgctcaagcagaaaatccagcgcgcgataaaccgttggcggcttggcttgcggttcagcttcgcgcagtaaatcaagcagatcataagcgctgatagcgccatcctgcagactcatcaggcgcaacacttccaggcgctgtggggtcaggcgcacattacgctgcgcgcagattttttcagcctgcgctaataactcctgcgttgtggtcttttccatcgggcacctcaaagtgggggttaagaatgtccttactttaccatgttccaggaaaaacaccgagaacccttattgttgccgtaatgttgattttctgctttgtaggtaaggtgttatgttgccttgtcgtaccattatcaacacgataataattaataattcatttttaaataaattgcttcaagttaactcgctatttatttaactgggtttaaacgcatacctgtagttcagaaattatgagcgatttttgatagtgaccagatggcaaaagaattataaggaggacacggtacgacaaaaaaggtagatgaatcatgttgaagataatacccggtgcaactggatactttaataaaacactcaatagtaatcaattcgataatgaagatgcaatcaaagataaattagataatagaggtagtatcaaaggtaaattaaataatatatatggtaaatctattgattatgcagcgctgcgtcatcgggatataattattgcaaaaatagatttgtttattcaacgaatcacgcataatttatggcatgcacgtaaaaaaatgtgtttttaattgtgcaaataaatgatctcaaaatgtgggtcaataagtatattgacgattgcactgatgaggatttaaacgatcgtgactttattgcaagtgttgttgaccgggctatttttcatttcgcgattaatagtatatgtaatcctggggataataaagatgcaatgcccattgaacaatgtacttttgatgtagaaactaagaatgaccttccctccacggttcagctattttatgaggaatctaaggataatgaacctttagcgaatatacattttcaagcaataggttctggttttttaacgtttgttaatgcctgccaggaacatgatgacaacagcttaaaattatttgctagcctgttaattagtcttagttattctagtgcctacgcagatttaagtgaaacagtgtatattaatgaaaataatgagagctacctgaaagctcagtttgaaaaattatctcaacgtgatatgaagaagtacctgggagagatgaagcgtctggctgatgggggagaaatgaattttgatggctatctggataagatgagtcatctggtgaatgaaggaacgctcgatcctgatattttaagcaaaatgcgagatgctgcaccacaattaattagcttcgcgaagagctttgacccaaccagtaaggaagagattaaaatacttacagacacttctaaattaatttatgatttgttcggggttaaaagcgagaaataatatgtgaagttcttcgatagtatggaaggcattatataaaaggacccaatatttattgggttcttttttctctatcaatactattagcagggagatatatcaccagagtttaatgtgtgattttttatttatcgtcgaacctggattgtttatcattggccttaacaaagttaacggctaataagattatttccatcacttcgtgagagcttcatgccttgagaggatctcaattttcttttgcaatgagacaggcgcttcctgttgttatggtatagtaccccgctattgagcctcctgaatagtgatgctgaataacataaccccatgatatatcgataaaataatctctacatttgaaaatgcacggtaattctgaaatgcaaaaaatcaaccaaaccagcgcaatgcctgaaaaaactgacgttcactggagtggtcggtttagcgttgcaccaatgctcgactggacggacagacattgccgctatttcttgcgtctgctttcccgcaatacgttgctgtataccgaaatggtgaccacaggggcgattattcacggtaaaggtgattatctggcgtacagtgaagaagaacatccggtagcgttgcaactgggcggtagcgatccggcggcgctggcgcagtgtgcaaagctggcagaagcgcgcggatatgatgagatcaacctgaatgtcggctgcccgtctgaccgggtgcagaacggcatgtttggtgcgtgtctgatgggtaatgcgcagctggttgccgactgcgtgaaagcgatgcgcgatgtggtgagcattccggtgacggtgaaaacgcgtattggcatcgacgaccaggacagctatgaatttctctgcgatttcatcaataccgtttccggcaaaggcgagtgtgagatgttcatcatccacgcacgtaaagcctggcttagcgggttaagcccgaaagaaaaccgtgaaatcccgccgctcgattatccgcgtgtgtatcaactgaagcgtgactttccgcatctgacaatgagcattaacggtggtatcaagagcctggaagaggccaaagcacacctgcaacatatggatggcgtgatggtcgggcgcgaggcgtatcagaatccgggtattctggcggcggtagaccgggagatctttggttccagcgataccgatgccgatccggtggcggtagtgcgcgccatgtatccgtacattgagcgtgaactcagccaggggacgtatctcggccatattacccggcatatgttgggcttgttccagggtattcctggcgcgcggcagtggcggcgttatttaagtgaaaatgcccataaagcgggtgcagacattaatgtgctggaacacgcgctcaaactggtggcggataagcgttaacttttcaccaaaaagtagtcaaattcaccacgccctgcgcaccgtcgcggggcgttttgctgttaaatcaatagattatttttggcatgattcttgtaatgccagcaagagatttcatatttgggagagcatcatgctggaactactttttgtgattggcttttttgtcatgctgatggtcaccggcgttagcttgctgggcattatcgccgcgctggttgtggcgacggccattatgttcctcggcggtatgctggcattgatgattaagttgctgccgtggttactactggcgattgcggtggtgtgggttattaaggcgattaaagcaccaaaagtgccgaaatatcagcgttatgaccgctggcgttactaagggattgtgcggatgatcacaacctaaggttttatccttagaacaaaataggaattgataatcaaatctgtcactattgcgcctctaacagattcatcgtgctgtaccctacatacagccgaactataaaaagaaagggcttcccaggtggaagccctatttcttttatggaatcagcaggctggaaccttgcgtcgcccggctttccagaatctcatgcgcacgctgcgcatccttcagcggatatttctgctgctcggcgacatcgaccttaatcacaccgctggcaatcaaagagaacagttcattactggcctcggttaattcctcccgcgtggtgatatagccttgcagggaagggcgtgtcacatacaagctgcctttttgattgagaatgcctaagttcacaccggtaaccgcaccactactgttgccaaaactgaccattaagccgcggcgttgcaggcaatccaggctccgttcccaggtgtctctgcccacggaatcgtacaccacgcgcactttcttaccgccggtgatctcttttaaccgctcgaccagatcctcttcacgatagttaataacctgccacgcgcccgcttttagcgcgctctgcgctttttgcgcggttcctacggtgccgataagtttcgcgcccagggcttttgcccactggcaggcaattaagccaacgccgccagccgctgcgtggaacaggaactgttcatcgggtttaatttcataggttttgcgcagcagataataaaccgttaagcctttcaggaaggatgccgcagcttgctcaaaagaaattgccgcaggcagaatcgccgctttatccgcaataatgttatgcacagagctgtaagcgcctaacgcgctctgcgcatagactacacgatcgcctgccttaatatgctttacaccactgccgactttactcacgatgcctgctgcttcggtgcctaatccgctgggtaggcttggcggcgggtaaaggccgctgcggatatatgtgtcgataaaattgatgccgatggctttattttcgacctggatttcattctccgccggatcggcaggagtgaactctacggcttgaagtacttccgggccaccgtgcttgtgaaattcaattcgtgttgccatgtgtcctccagaacgtatcgtcagggtctgcttcatatgataaagtttcgacccattctttatctcggtaactccattcactatggcaggaaataaacccttcaacaaacagcaggctgaaccccgcgaacgcgatccacaagttgccgggctgaaagtgcctccgcacagcatcgaagcggagcagagcgtgttgggcggtttaatgctagataacgaacgctgggatgatgtagccgagcgtgtggtagcagacgatttttacacccgcccacaccgtcatatctttactgaaatggcgcgtttgcaggaaagcggtagccctatcgatctgattactcttgcggaaagcctggaacgccaggggcaactcgatagcgtcggtggttttgcttatctggcagagctgagtaaaaatacgccaagtgcggctaacatcagtgcctatgcggacatcgtgcgtgaacgtgccgttgtccgtgagatgatcagcgttgcgaatgagattgccgaagctggttttgatccgcaggggcgtaccagcgaagatctgctggatctggctgaatcccgcgtctttaaaattgccgaaagtcgtgcgaacaaagacgaagggccgaagaacatcgccgatgtgctcgacacaaccgtggcgcgtattgagcagttgtttcagcagccacacgatggcgttaccggggtaaacaccggttatgacgatctcaacaaaaaaaccgctggcttgcagccgagcgatttgatcatcgtcgccgcgcgtccgagcatgggtaaaacaacatttgcgatgaacctcgtcgaaaacgcggcgatgttgcaggataaaccggtacttatcttcagcctggagatgccaagtgaacagatcatgatgcgttctctggcgagcctgagccgcgttgaccagactaaaatccgtaccgggcagctcgatgacgaagactgggcgcgcatttccggcaccatgggtattttgctcgaaaaacgcaatatctatatcgatgactcctccggcctgacgccaacggaagtgcgttcccgcgcacgccgtattgcccgtgaacacggcggcatcgggcttatcatgatcgactacctgcaactgatgcgcgtaccggcgctttccgataaccgtacgctggaaattgcagaaatctctcgcagcctgaaagcactggcgaaagaactgaacgtgccggtggtggcgctgtcccagttgaaccgttctctggaacaacgtgccgacaaacgcccggtcaactccgacctgcgtgaatctggctctatcgagcaggatgcggacttgatcatgtttatctatcgtgatgaggtgtatcacgaaaacagtgatttaaaaggcatcgcggaaattattatcggtaaacaacgtaacggcccaatcgggacggtacgcctgacctttaacggtcaatggagccgcttcgacaactatgcggggccgcagtacgacgacgaataataattattttatgaattaggtaattaaagcaaacacttatcaaggaacacaaatgcaagcggcaactgttgtgattaaccgccgcgctctgcgacacaacctgcaacgtcttcgtgaactggcccctgccagtaaaatggttgcggtggtgaaagcgaacgcttatggtcacggtcttcttgagaccgcgcgaacgctccccgatgctgacgcctttggcgtagcccgtctcgaagaagctctgcgactgcgtgcggggggaatcaccaaacctgtactgttactcgaaggcttttttgatgccagagatctgccgacgatttctgcgcaacattttcataccgccgtgcataacgaagaacagctggctgcgctggaagaggctagcctggacgagccggttaccgtctggatgaaactcgataccggtatgcaccgtctgggcgtaaggccggaacaggctgaggcgttttatcatcgcctgacccagtgcaaaaacgttcgtcagccggtgaatatcgtcagccattttgcgcgcgcggatgaaccaaaatgtggcgcaaccgagaaacaactcgctatctttaataccttttgcgaaggcaaacctggtcaacgttccattgccgcgagcggtggcattctgctgtggccacagagccattttgactgggtgcgcccgggcatcattctttatggcgtcagcccgctggaagatcgctccaccggtgccgattttggctgtcagccagtgatgagtctaacctccagcctgattgccgtgcgtgagcataaagccggagagcctgttggttatggtggaacctgggtaagcgaacgtgatacccgtcttggcgtagtcgcgatgggctatggcgatggttatccgcgcgccgcgccgtccggtacgccagtgctggtgaacggtcgcgaagtaccgattgtcgggcgcgtggcgatggatatgatctgcgtagacttaggtccacaggcgcaggacaaagccggggatccggtcattttatggggcgaaggtttgcccgtagaacgtatcgctgaaatgacgaaagtaagcgcttacgaacttattacgcgcctgactagtagggtcgcgatgaaatacgtggattaatcgttctgtaatatttgattgtctgtgccggatgcggcgtgaatgccttatccggccaataaaatcctaaaaattcaataagttgatgttctttcatgctcttataaaggtcgtgcctctggcggatgtacgtttgtcatgagtctcactctgttgctaattgccgttcgctcctgaacatccactcgatcttcgccttcttccggtttattgtgttttaaccacctgcccgtaaacctggagaaccatcgcgtgtttcaaaaagttgacgcctacgctggcgacccgattcttacgcttatggagcgttttaaagaagaccctcgcagcgacaaagtgaatttaagtatcggtctgtactacaacgaagacggaattattccacaactgcaagccgtggcggaggcggaagcgcgcctgaatgcgcagcctcatggcgctagcctttatttaccgatggaagggcttaactgctatcgccatgccattgcgccgctgctgtttggtgcggaccatccggtactgaaacaacagcgcgtagcaaccattcaaacccttggcggctccggggcattgaaagtgggcgcggatttcctgaaacgctacttcccggaaagtggcgtctgggtcagcgatcctacctgggaaaaccacgtagcaatattcgccggggctggattcgaagtgagtacttacccctggtatgacgaagcgactaacggcgtgcgctttaatgacctgttggcgacgctgaaaacattacctgcccgcagtattgtgttgctgcatccatgttgccacaacccaacgggtgccgatctcactaatgatcagtgggatgcggtgattgaaattctcaaagcccgcgagcttattccattcctcgatattgcctatcaaggatttggtgccggtatggaagaggatgcctacgctattcgcgccattgccagcgctggattacccgctctggtgagcaatagcttcagcaaaattttctccctttacggcgagcgcgtcggcggactttctgttatgtgtgaagatgccgaagccgctggccgcgtactggggcaattgaaagcaacagttcgccgcaactactccagcccgccgaattttggtgcgcaggtggtggctgcagtgctgaatgacgaggcattgaaagccagctggctggcggaagtagaagagatgcgtactcgcattctggcaatgcgtcaggaattggtgaaggtattaagcacagagatgccagaacgcaatttcgattatctgcttaatcagcgcggcatgttcagttataccggtttaagtgccgctcaggttgaccgactacgtgaagaatttggtgtctatctcatcgccagcggtcgcatgtgtgtcgccgggttaaatacggcaaatgtacaacgtgtggcaaaggcgtttgctgcggtgatgtaatgcaggaaagcaggctggagctacccagcctgcagtgaaattaaactgtcgtcgctttcactctttctttatagatgatttttttgatgccatcgttctacgtgagagataataaacgttgttagttcttttattgttaagcttatcccaattatctggaattccttatcctgtttttttgggtggagtaataatttctgcacatctaaccattattaaatttaataataagtatcgggtttgttacgatagaatatttctatatcctcaagaatatgctttgccttattgcctgtgactttctgagattcaattatagtatcgttaaattctaatgttaaagagaactcttttttccgctttgtgtaagtttaaccttatattgattaccaatatcaaataaaaaggtcctgtaatgagaataatcacctttaacctcctcggcaaaacagcaaagcgtgcaaatatacataaagtctttcttacccctgattttgttaactaaatcaataaatgcgtgaaaaactttacttgcaatagaacttgatacttcttctccaggtctaaaaaatcttttgcaatttttaactgtgtttctatgtataaaaagaaatctttggcataagagatatctttattatttagtgcatctagctcaacaggtaaagatgtcgttttgttgctattcacatatgatatattcatatcatcatctccatcgcgagtaataaaattaatcaccattgtagggtagggggctggtcaatcagaaatcatctttataaacttcgattgtttttgtaatgctgtatcattaagttcattaaatcgtacagcagataaatgttctatcaaatttcgctcatttgccgaggattcatcataataaacgtaaaattaatgtatccttacatcgagtaataaacattttttatacaaaaaaagacaggaacgtatttactgggttaaatataatcatcctgcttttcatcacaaaaaccgcagataatccttcctttccccggcagctggcgttatggtcagatggtttttgcaacaaatctcacaataaaaagtttcaacatactgactatttagggaaaaatatgcgcaagatcacacaggcaatcagtgccgtttgcttattgttcgctctaaacagttccgctgttgccctggccagttctcctagtccgcttaaccctgggactaacgttgccaggcttgctgaacaggcacccattcattgggttagcgtcgcacaaattgaaaatagcctcgcagggcgtccgccaatggcggtggggtttgatatcgatgacacggtacttttttccagtccgggcttctggcgcggcaaaaaaaccttcagcccagaaagcgaagattatctgaaaaatcctgtgttctgggaaaaaatgaacaatggctgggatgaattcagcattccaaaagaggtcgctcgccagctgattgatatgcatgtacgccgcggtgacgcgatcttctttgtgactggtcgtagcccgacgaaaacagaaacggttagtaaaacgctggcggataattttcatattcctgccaccaacatgaatccggtgatctttgcgggcgataaaccagggcaaaatacaaaaagccaatggctgcaggataaaaatatccgaattttttatggcgattctgataatgatattaccgccgcacgcgatgtcggcgctcgtggtatccgcattctgcgcgcctccaactctacctacaaacccttgccacaagcgggtgcgtttggtgaagaggtgatcgtcaatagtgaatactgacagagcgggagagcgtgatgctctcccgaatgctgtttttttaatcacacctttatcctttcgctgtcttgctgcaaactgattaagagagttttatcaaggagcagcacatgtggtatcaaaagacgctcacgcttagcgccaaatctcgtgggtttcatctggtaacggatgaaattctgaatcagctggctgatatgccgcgcgttaacatcggcttactgcatctgttgctgcaacatacctccgcctctctgacacttaatgagaactgcgatcccaccgtacgccacgacatggagcgttttttcctccgcaccgttcccgacaacggaaattatgagcatgactatgagggagcagacgatatgccttctcatatcaaatccagtatgctgggaacaagccttgtattgccggtgcataaagggcgtattcagaccggcacctggcaaggcatttggctgggggaacatcgcatccacggcggaagccgtcgcatcatcgcgacactacaaggggagtaaaaaatgaccattagcgagttgctacaatattgcatggcaaaaccaggcgcagaacagagcgtgcataatgactggaaagcgacgcagatcaaagtggaagatgtactgtttgcgatggtgaaagaagtagaaaatcgcccagctgttagcctgaaaaccagcccggagctggcggagctgctacgtcagcagcacagcgatgtgcgtccaagccgccatctgaataaagcgcactggagcaccgtgtatctcgacggtagcctgccagatagccaaatctattatctggtggatgcgtcttatcagcaggcggtgaatttactgccggaagaaaaacgtaaattgctggtgcaactctgaaaggaaaaggccgctcagaaagcggccttaacgattacagcatcggcttaaggaagcgtgccgtgtgacttgcttcgcactccgcgacggtttctggcgtaccggagacgaggatctcgccgccaccactgccgccttctggtcccaggtcgacaatccagtcagcggttttgatcacgtcgagattgtgctcaatcaccacaatggtgttgccctgatcgcgcagtttatgcagtacgtcgagcagttgctgaatatcggcgaagtgcagaccggtggtcggctcgtcgagaatatacagcgtctgcccggtgccgcgtttactcagttcacgcgccagcttcacgcgctgggcttcaccgccactaagggtggttgcggactgccccagtcgaatgtacgtcaggccaacgtccatcaacgtttgcagcttacgcgccagtgcaggtacggcatcaaagaactcacgcgcctcttcgatggtcatatccagcacttcgtggatggttttgcctttgtacttaatctccagcgtttcacggttatagcgtttacctttgcactggtcgcacggcacgtagatatccggcaggaagtgcatctccactttgatcacgccatcgccctgacaggcctcgcagcgtccgccacgaacgttaaagctgaaacgtcccggcgtatagccgcgcgcacgggattccggtacgcccgcaaacagttcgcgcacaggcgtaaacacgccggtataggtcgccgggttagaacgtggagtacgaccaattgggctttggtcgatatcgatcactttatcgaaatgctccagcccctgaatatcgcgatacggtgctggttcggcgatggtcgccccattcaactggcgttgggcaatcgggaacagtgtgtcgttaatcagcgtgcttttaccggaaccactaaccccggtgatgcaggtaaacagacccaccggcagcgtcagcgtcacgtccttcaggttgttgccgcgtgcgcctgtcagcttcagcactttttccggattcgccggaacgcgtttcttcggcacttcaatcttgcgtttgccgctcatgtactgcccggtcaagctctccggcaccgccataatcgcttccagcggaccttctgcgaccacttcaccgccgtgaacacctgcgcccgggccaatgtcgatcacatggtcagcggcgcgaattgcgtcttcgtcgtgctccaccacaatcacggtattaccgagatcgcgcagatggataagcgtacccaacaggcgctcgttatcacgctggtgcaggccgatagacggctcgtccagcacgtacataacgccaaccaggcccgcaccaatctggctcgccagacggatacgctgtgcttcaccgccagaaagcgtttctgcgctgcgggaaagcgtcaggtaattcaggccgacgttaacgaggaatttcagacgatcgccgatctctttaaggattttttctgcaatcttcgcccgctgacctgcgagtttgagattgttgaagaattccatcgcatgaccaatgctcatgtcggagatagcaggcagcggcgtattctcgacatacacgtggcgcgcttcccgacgcagacgcgtcccttcgcagctggcgcacggacgattactgataaacttggctaattcttcgcgtaccgcgctggattccgtctctttatagcggcgctccatattatgcagcacgccttcgaacggatgacgacgaatggaggtatcgccacgatcgttcatgtatttgaattcaatgttttctttgccagaaccgtacaacaccactttatgcacgttcgcgctcaggctgccccacggcgcttcgacgtcgaacttatagtgatctgccaggcttttcagcatctggaaataatagaagttgcggcgatcccagccacggatcgcaccaccagccaggctcagttccggattctggatcactcgatcaggatcgaaatattgctgtacgccaaggccgtcgcaggtcgggcaggcccccgccgggttgttaaagctaaacagtcgcggctccagttcacgcatactgtagccgcaaattgggcaggcgaagttggcggagaacagcagctcttccgctttcgggtcgtccatatccgccactaccgcggtaccaccggaaagctccagcgcggtttcaaaactctcggcaagacgttgggtaagatcgtcacgcaccttgaagcgatcaaccaccacttcaatggtatgtttcttttgcagttccagttttggcggatcggaaagatcgcagacttcgccatcaatacgagcacggatgtagccctggcttgccaggttctccagcgttttggtgtgttcgcctttgcgctctttaatgattggcgcgagtagcatcagacgcttgccttccggctggctcagcacgttatccaccatctggctgacggtttgcgccgccagcgggacgtcgtggtccggacagcgcggctcgccaacgcgggcgaataacaaacgcaaatagtcgtggatttcggtgattgtccccaccgtagaacgcgggttatgagacgtgcttttctgctcaatactgatggcaggagaaagcccctcaatatgatcgacgtccggcttttccatcagactcagaaactgccgcgcgtaggcggaaagggattcaacgtaacggcgctgcccttcggcatataaggtgtcgaaagcgaggctggatttgccagaaccgctaagcccggtcacgacaatgagcttgtcgcgggggataacgaggttgatgtttttgagattatgggtgcgggcgccccgaacttcgatcttatccattcacctttcccggattaaacgcttttttgcccggtggcatggtgctaccggcgatcacaaacggttaattatgacacaaattgacctgaatgaatatacagtattggaatgcattacccggagtgttgtgtaacaatgtctggccaggtttgtttcccggaaccgaggtcacaacatagtaaaagcgctattggtaatggtacaatcgcgcgtttacacttattcagaacgatttttttcaggagacacgaacatggccagcagaggcgtaaacaaggttattctcgttggtaatctgggtcaggacccggaagtacgctacatgccaaatggtggcgcagttgccaacattacgctggctacttccgaatcctggcgtgataaagcgaccggcgagatgaaagaacagactgaatggcaccgcgttgtgctgttcggcaaactggcagaagtggcgagcgaatatctgcgtaaaggttctcaggtttatatcgaaggtcagctgcgtacccgtaaatggaccgatcaatccggtcaggatcgctacaccacagaagtcgtggtgaacgttggcggcaccatgcagatgctgggtggtcgtcagggtggtggcgctccggcaggtggcaatatcggtggtggtcagccgcagggcggttggggtcagcctcagcagccgcagggtggcaatcagttcagcggcggcgcgcagtctcgcccgcagcagtccgctccggcagcgccgtctaacgagccgccgatggactttgatgatgacattccgttctgatttgtcattaaaacaataggttatattgttttaaggtggatgattaaagcatctgccagccataaaaaagaagcctccgttatggaggcttctacgtatcaggtcaaaatcattggccattgtggcggtgtctgattcatctcttctatcatcacgctctcgatgttgtgccagatagcggtgatgtccgccattgtgatgccaagcaaccccattgcgaaccaacaggcggaaacaacgcccagaccgctgctgatcaccgcaagcccgacataatcagaccgacgaaaacggatgttgagtgtgctggccagaaacatcattacggcactaagaagttgccagcgaagaagaaccacgccagtggtgagggtagccatcaaacaattcctctgaaaagagccgatgccctggacagcgcggcgttgttcacgggaggcgtggtacactctggctatcgcggggcttgcagaacacaaaaatgaaacactctgtttgtttcattaattttgtgaactatatcacaattgattgtttgttagccatattaggccgtgacttttattgctgtacagattatgtggtttttcagtggcattaagggcatatcttcccgccgcctctgcattcctgtaggaaattaattttgaatatcaatgaattattttcatccaggtgacgattagaaaggtatcaatttcaaatcaggcaaaagtgctatttataccgtaagatttatctaaagacgtcggtacccagggttttcaccttgcaatggccgggtataaacaggcaggaaattgatagcaatgagtcatcgtgcacgacaccaattactggcgttgccgggcattatctttttagttctctttcccatcattcttagcctatggattgccttcctttgggcaaaaagtgaagtgaataatcagctccgaacctttgctcaactggcactggataaatccgagctggtcattcgccaggcagatttagtgagcgatgcagctgaacgctatcaggggcaagtttgcactccagcccatcaaaagcgaatgttgaatattattcgtggctatctttatattaatgaattgatctatgcccgtgataaccattttttatgcagtagcctgatagcgcctgtaaacggctatacgattgcaccggccgattataagcgtgaacctaacgtttctatctattattaccgcgatacgccttttttctctggctataaaatgacctatatgcagcggggaaattatgtggcggttatcaaccctctcttctggagtgaagtgatgtctgatgacccgacattgcaatggggtgtgtatgatacggtgacgaaaacctttttcagcttaagcaaagaggccagcgcagcaacgttttctccgctgattcatttgaaggatttaaccgtacaaagaaatggctatttatatgcgacagtttatagcacaaaacgcccaattgcagccattgttgcgactagttatcaacgtcttataacccatttttataatcatcttatttttgcgttgcccgccggtattttggggagtcttgttctgctattactctggctacgtattcgacaaaactatttatctcccaaacgtaaattgcaacgcgccctcgaaaaacatcaactttgtctttattaccagccaataatcgatatcaaaacagaaaaatgtatcggcgctgaagcgttgttacgttggcctggtgagcaggggcaaataatgaatccggcagagtttattccgctggcagaaaaggaggggatgatagaacagataactgattatgttattgataatgtcttccgcgatctgggcgattacctggcaacacatgcagatcgctatgtttctattaacctgagcgcctccgattttcatacgagtcggttgatagcgcgaatcaatcagaaaacagagcaatacgcggtgcgtccgcagcaaattaaatttgaagtgactgagcatgcatttcttgatgttgacaaaatgacgccgattattctggctttccgccaggcaggttacgaagtggcaattgatgattttggtattggctactctaacttgcataaccttaaaagtttgaatgtcgatattttgaaaatcgacaaaagctttgttgaaacgctgaccacccacaaaaccagtcatttgattgcggaacacatcatcgagctggcgcacagcctggggttaaaaacgatcgctgaaggcgtcgaaactgaggagcaggttaactggctgcgcaaacgcggcgtgcgctattgccagggatggttctttgcgaaggcgatgccgccgcaggtgtttatgcaatggatggagcaattacccgcgcgggagttaacgcgcgggcaataaaattacaggcggtggcgataatcgctgggagtgcgatcaaactgccgacggaaaacgcgggagaaggtctgctggctgacataacccaggtccattgcgatatcaaaaatcggacgctcggtggtgcgcaactcaacggcggccagtaacaggcggcgttggcgaatgtaatcgccaagcgtctgatgcgtcaccgtgcggaacattcgttgcaagtaccacttactatagccacttttttttgcgactacatcaatgttaagcggctggtcaatatgctcgtcaatccatgcgataagatcctgaataattttctgatgggacataaatctgcctcttttcagtgttcagttcgttaattcatctgttggggagtataattcctcaagttaacttgaggtaaagcgatttatggaaaagaaattaccccgcattaaagcgctgctaacccccggcgaagtggcgaaacgcagcggtgtggcggtaagcgcgctgcatttctatgaaagtaaagggttgattaccagtatccgtaacagcggcaatcagcggcgatataaacgtgatgtgttgcgatatgttgcaattatcaaaattgctcagcgtattggcattccgctggcgaccattggtgaagcgtttggcgtgttgcccgaagggcatacgttaagtgcgaaagagtggaaacagcttagctcccaatggcgagaagagttggatcggcgcattcataccttagtggcgctgcgtgacgaactggacggatgtattggttgtggctgccttagccgcagtgattgcccgttgcgtaacccgggcgaccgcttaggagaagaaggtaccggcgcacgcttgctggaagatgaacaaaactaaagcgccacaagggcgctttagtttgttttccggtctttgtctttctctctatcccgctggtacacaggagggtttcccccgacgtcaacacacctcattcgagcacgtggtggaggttccggttggtgttgatgctttaattgtatgtcaccgacgtttcttcgccagtgtaaaagtatactttttaaccgcaatatttttgtcatctcagacgattttttatcgcaatcctgaacggtatacggctcgataacgctgcaatcttgcgcaccgacgataacgtttgcgcatcaattgcctggtttttcatcgtcaagacaataaaagagaaaaaagcagcaaacttcggttgaaaaagccgctatgatcgccggataatcgtttgctttttttaccacccgttttgtatgcgcggagctaaacgtttgcttttttgcgacgcagcaaattgtcgcaaacctggagcaggaagataacgtttcgctggcaggggattgtccgccacgcatcttgacgaaaattaaactctcaggggatgttttcttatgtctacgccaagtgcgcgtaccggcggtagtctcgacgcctggtttaaaattagtcaacgtggaagcactgtccgtcaggaagtggttgccgggttaacaacgtttctggcgatggtctacagcgtcatcgtcgttccaggtatgttgggtaaagcaggcttcccgcctgcggcagttttcgttgcaacctgtctggttgccggactcggttctatcgtgatgggtctgtgggctaatctgccgttggcgattggttgcgccatctccctgacagcgtttaccgcattcagcctggtgctggggcaacatattagcgtacctgtcgcgctgggtgccgtgttcctgatgggtgtgctgtttacggtaatttctgccacgggtatccgtagctggattttgcgcaacttgcctcacggtgtggcgcacggcacggggattggtatcggtctgttcctgctgctcattgccgctaacggtgtcggtctggtgattaaaaacccgcttgatggtctgcccgttgcgctgggtgatttcgcgaccttcccggtgattatgagtctggtaggtctggcggtgatcatcggcctggaaaaactgaaagtccctggtggcattctgctgaccattatcggtatcagtattgtcggtttgatcttcgatcctaacgtccatttctccggcgttttcgccatgcctagtttgagcgatgaaaacggcaatagtctgattggcagcctggacattatgggcgcgctgaatcctgtagtcctgccaagcgttctggcgctggtgatgacggcagtatttgatgccaccggaactatccgtgccgtcgccggccaggcgaacctgctggataaagatgggcagatcatcgacggtgggaaagcactgaccactgactccatgagcagcgttttctctggcctggtgggtgcggctccggcagcggtatacatcgagtctgcggcgggtacggcggcgggcggtaaaaccggtttgacggctatcaccgttggcgtgctgttcctcctgattctgttcctctctccgctctcttacctcgttccggggtatgcaacggctccggcgctgatgtacgttggcctgctgatgctgagcaacgtggcgaaaatcgactttgctgattttgttgatgcgatggcgggtctggttacggctgtattcatcgtgctgacctgtaacatcgtaacaggcatcatgatcggcttcgcgactctggtgattggtcgtctggtttccggcgaatggcgcaagttgaacatcggtacggtcgttatcgccgtggcgctggtgaccttctatgcgggtggctgggctatctaatctttcatcggattctgaaaacgggtggcaatggctgcccgtttttattttctccgcacattgtgtgagcttttgcgatattctgaaaaaaatgagaattcaggcataacgtctttctcagatcataaaaaacatcgcaaacagggaacgcatggaaatcttcttcaccatactgataatgaccctcgtggtcagcctgtccggggtggtcactcgtgtcatgccctttcagatcccgcttccgcttatgcaaatcgccatcggtgcgctactggcgtggccgacgtttggtttgcatgtggagtttgatcctgaactctttttagtcttgtttatcccgccgttgctgttcgctgatggctggaaaacgccgacccgtgaatttctcgaacatggtcgagagattttcggcctcgcgctggcgctggtggtggtcaccgtggtcggcattggcttccttatttactgggtggtgccgggcattccgctgatccctgcctttgcgctggcggcggtgctttctccgaccgatgctgtggcgctctccgggattgttggcgaagggcgcatcccgaaaaaaatcatgggcattttgcagggcgaagcgttgatgaatgacgcctccggtctggtgagcttgaagtttgccgtagcagtggcgatggggacgatgatcttcaccgtcggcggtgcgacggtcgaatttatgaaagtagccattggcggtattctcgccggttttgtggtgagctggctgtacggtcgcagcctgcgattcctcagccgctggggcggtgatgaacccgcgacgcagatcgtcctgctgttcctgctgccattcgcttcttatctgattgccgaacatattggcgtttccggcatcctcgctgcggttgccgccgggatgaccatcacccgctccggtgtgatgcgccgtgcgccgctggcaatgcgcctgcgtgcaaacagcacctgggcgatgctggaatttgtctttaacggcatggtgttcctgctgttaggtctgcagctgccgggtattctggagacgagcctgatggcagcagaaatcgaccctaacgtcgaaatctggatgctgtttaccaatattattctgatatatgcggcgctgatgctggtccgtttcggctggctgtggacgatgaaaaagttcagcaaccgcttcctgaagaagaagccgatggagtttggtagctggaccacacgagaaatcctgatcgcgtctttcgccggggtgcgtggggcgatcactctggccggtgtgctctctatcccgctgctcttgccggatggtaacgtcttcccggcgcgctatgagctggtgttcctggcggctggcgtcattctcttcagcctgtttgtcggcgtggtgatgttgcctattctgctacaacacattgaagtcgcggatcatagccaacaattgaaagaggaacgtattgcgcgagcggcaacggcagaagtggcgattgtggcgatccagaaaatggaggagcgtctggcggcggataccgaagagaatatcgataaccagctgcttacggaggtcagttctcgcgtcattggtaacctgcgtcgtcgcgccgatggacgtaacgacgttgaaagttccgtgcaggaagagaaccttgagcgtcgcttccgtctggcggcattgcgttctgaacgtgctgaactttaccacctgcgcgccacacgggagatcagcaacgaaacgctgcaaaaattactgcacgatctcgatttgcttgaagcgttgctaattgaggaaaatcagtaagccgaaagcgacgtaaccaggcccgaggtaatctgaaaaaggtgcaatcttttgcacctttaacaggttagctcgggctaacattcatgattctaaaacaaataaattatctctcttttaaagtcaattcattggctgttcttcgacttaacctcaatctgcatcttgcataatatctgcagtaatcttcatagcgactgcatgaagattatcctcagtttgactcatgccagtatgagtggcacaatcttcttcaaagaatttctgtagtgttaccaggatatcactattaatggagatattttcctcaccacggagaatggtaatacccattccctggacgctagcctcatcgaaattaacacgatagagacggatattaaacatccaggcttttgttaaaacagaacagttgaaatggcaattgcttaaattggcattattaaaattaacattagccatattagagtcggtacatataaccatttcgaggaacgtatttgttaaccgcgtaaaaaagagtttgctatcaattaagtttatattctggagggttgctttattcaggttgacacgagacagatcagcatgttcaaagttaattaaatcaagtttagagaagctaaggtcggctctaaataaattaatatatggcgctattactttataaagatttacctcagccatgtatgccatataaaaattactataatcaaggaaggtatttttaatattggctctattcattgttgcattgtagaattgaacatgcatagcggaacaactatttagagttccgtcagtcatttttatctgagcgaaattactgtcatcgagaatacaattatcaaaaagtattttttccattatggcgaaattaaaattcgttttatacatattacagtcctgaaaaatagcgttttgtagtctgcaacctgcaaaattgctattggataaatcttcatctttaatcacgatacctttcaggctaaggtgactaaaatcgtaaccaccatttactgtctgtgggatttcgatagtattattatggacggtgacattatttataaaatataccaccttaatactcacttccttatctttattaaggtaaactcttctcgtaattctatcgtcacatttattatttgcatgactagctatatctataaaatatttatgtattttcctgtccgtttctttcgtgatttttccacttggtaaactatcataaattcttttcattttctgaatcaagcctatcactttttcatgatcatccattttgaaaagagagagggctttattgtcaattaacgtgtttttatgatgtttgctgtaattatcactttttgttttctttgtatgacttggacttgtgacagagtggttatcgttaatcaggcaaagagggaaaaacatattatttaaaccattatagcgcataaaatatccttataattaacaagaaagaaaaggcatattctctgcattatcattttctacgactgtcaaaaatcgctcattttttaatgagtttatttgtttaatattatgggaaaaggtgatgcatttgggagaggaagagtattccccggtcagacgaccggggaaggggagagattaatgcgcgcggccttgctcaacgccaaagccggtctgggagcggataaactgcgcgcggaacagttcacgctcacgcgcgccttccgcactgttatcggttgcgctgaagaaccagatgccgaggaatgccacggtgatagagaacagcgccgggtattcatacgggaagatggctttttcgtgaccaaggatctgtacccaaatcgtcgggccgaggatcatcagtactactgcggtaatcagccccagccagccacccatcatcgcgccacgcgtggtcagtttgctccagtacatagaaagcagaatgatcgggaagttacagctcgccgcgatggcaaacgccagccccaccataaaggcgatgttctgattctcaaacagcacgccgaggataatcgcaatcacgccgaggatcagtacggtgattttacttacccgcagctcttcacgttcggtcgcgccttttttgaagacgttagcgtacaagtcatggctaaccgcggatgcgcccgccagcgtcagacccgcaaccaccgcgaggatagtggcgaaagcaaccgcactaataaaaccgaggaacaggttgccgcccactgcattcgccaggtgaacggccgccatgttgttaccaccaatcagatggcccgccgcgtctttatattccggattcgcaccaaccagcatgatcgcgccgaagccgataataaaggtcagaatatagaagtagcccataaacccggtggcgtagaacacgctcttacgtgcttcgcgggcatcgctgactgtaaagaagcgcatcagaatgtgcggcaagcccgccgtaccaaacatcagtcccagacccagagagagcgcggagatcggatctttcaccagcccgcccggcttcatgatgtcgacacctttcgggtgtaccgccatcgcttcactgaacagattgttgaagctaaagccgacgtgtttcatcaccataaaggccataaagctggcaccgaacagcaacagcacggctttgataatttgcacccaggtggtcgccagcatgccgccgaacaggacgtacatcatcatcagcacgccgaccagcaccaccgcaatgtgatagttaaggccaaacagcagctcgatcagtttacctgcgcccaccatctgggcgataaggtaaagcgccaccaccaccagagaaccacaggcgctaagaatacgaatcggcccttgtttcagacggtaagaggccacatcggcaaaggtgtagcgccccaggttacgcagacgttcggcaatcaggaacaaaatgatcggccagcccaccaggaagcccaggctgtaaattaagccgtcatagccggaggtaaacaccagcgcggagatccccaagaaactggcggcggacatatagtccccggcaatcgccagcccgttctggaagccagtgatattgccgcctgcggtgtagtagtcgctacgagaacgtacgcgtttacttgcccagtaggtaatgccgagcgtaaacacgacgaaaatcaggaacataataatcgcctgccagttcgttggctggcgctctacggccccgctaatagcatccgcggcgttagctgcgaaagggagtgtggcggcaagcgccgtcagaactcttttcatgatgcttgtacctcatgcagttatttcaacttgcttgtacctcatgcaggacttcattattaagacggtcgaattcgccgttcgcccgccagatgtagataccggtgagaacaaaggagatcacaatcactccaacaccaattggaataccgcgtgtgacgctggtgttcggattcagcggcgtgcccagccagccgggcgcgaaggcgatcagtaaaataaagccgatataaactgccagcataataatgctcaggatggtggcaaaccgttgccgtttttcgactaactccctgaaatgcgcattgtcttctatccgctgataaatagtgccattcatcacagattctccagaggtaatgtagggattgttttaattcccgctcccttatgggagaaggttaacgctcgggtaacccttgccgaatgtaggccggataaggcgtttacgccgcatccggcaatcaatgcctgatgcgacgctgtcgcgtcttatcaggcctacaaaccgttaccgactcgcatcgggcaattgtgggttagcttggcatcgcgatagcctgcttctcttcaagcagcttctcgactacgccaggatcggcaagcgtgctggtatcgcccaggttgctggtatcgcccgccgcaattttgcgcagaatacggcgcataattttgccggagcgggttttaggcagggagtcggtccagtgcagcacgtctggcgtcgccagcgggccaatctctttacgcacccagttgcggacttctgcgtacagttctggactcggttcctccccgtgattaagcgtgacgtaggcgtagatcgcctgacctttaatattgtgcggaatacctactacggcggcttcggcaatcttcggatgcgccaccagcgcgctctcaatctctgccgtccccagacggtgaccggagacgttcagcacgtcgtccacacgcccggttatccagtaatagccatcttcatcgcgacgcgcgccgtcgccgctgaaatacatatttttgaaggtggagaagtaggtctgttcaaaacgttcgtgatcgccaaacagcgtacgcgcctgacccggccaggagtcggtgattaccaggctaccttcggtggccccctccagcgggttaccttcgttatcgaccagcgccggttgcacgccgaagaacggacgtgttgcgctaccggctttcagctcggtagcgccaggcagcggggtgatcatgaaaccgccggtttcggtctgccaccaggtatcgaccaccggacatttctcgttgccgatttttttccagtaccactcccacgcttccgggttaattggctcgcccacggaaccgagaatgcgcaggctgctacggtcggtgccttcgatcgctttatcgccttccgccatcagcgcgcggatcgccgtgggtgcggtatagagaatattgacctgatgcttgtccaccacctgcgccatacgggcaggcgtcggccagttgggtacgccttcaaacatcagcgtggtcgcaccgcaggccagcgggccgtacagcaagtaactgtgtccggtcacccagcccacatcggcggtgcaccagtagatatcacccggatgataatcaaagacatatttaaaggtcagcgccgcgtacaccagataaccgccggtagtatgcagcacaccttttggcttaccggtagaaccggaggtgtagagaataaacagcggatcttcggcgttcatctcttccgcctggtgctgatcgctcgcttgctcaaccaggtcgtgccaccacaggtcgcgcccttcctgccagtcaattttcccgccagtacgcttcagtaccaccacatgctctacgctggtgacgttcgggtttttcagcgcgtcatcaacgtttttcttcagcggaatactgcgcccggcacgcacaccttcgtcggaagtgatcaccagtcgactgttggaatcaataatgcgcccggcaacggcttccgggctgaagccgccgaaaatcacgctatgcaccgcgccaatgcgggcgcaggccagcatcgcaaccgcggcttccggcaccatcggcatataaatcgccaccacatcaccttttttaatgcccagctcgagcagggtattggcgaagcggcagacgtcgcggtgcagctctttatagctgatatgtttgctctggctggcgtcgtcgccttcccagatgatggcggtacgatcgccgttttcttgcagatggcggtcaaggcagtttgccgccagattcagcgtgccgtcctcgtaccatttaatggacacattaccgggggcaaaggaggtgtttttcaccttctggtaaggtttgatccagtcaagaatttttccctgttcgccccagaaggtatcaggtacgttaatagattgttgatacatcgcctcgtactgctgagggtttatcaggcaacggtctgcgatgttggcaggaatggtgtgtttgtgaatttggctcatgcttttgttctccttgtaggatgttaataatatgtggcataagcgttaaatgtaggggtattggcagttttgtttagtatttgggcgacagatcacgcaaaagtagaattgtgcaaataaacggcagggtaatttttgaaggtcagcaacaaaagttgattaattctttgaggaacatgcagttatgcatgctgttgaaaaagaggaagatactgactaactctaaagtggtattttacatgcacttacaattgattaaagacaacattcacagtgtggttatttgttacacataggggcgagcaatgtcatgacagtgtaggtgcggttactgtcgtgaaaaacaataaaaaccgccattgcaacaatggcgcaattcggatgaagcccctatgacaaggataaaaataaacgcacgccgtatcttcagcttattgattccttttttctttttcacttctgttcacgctgaacaaacggctgctcccgcaaaacctgtaactgtggaagcgaagaatgaaacctttgccccgcagcatcccgatcaatatctctcctggaaagccaccagcgaacagagtgagcgtgttgacgccctggcggaagatccacggctggtgatcctgtgggcggggtatcccttcagccgcgattacaacaagccgcgtggacatgcttttgctgtgaccgatgtgcgtgaaaccctgcgtaccggtgcgccgaaaaacgctgaagatggtccgctaccgatggcatgctggagttgtaaaagcccggatgtggcgcgtctgatccagaaagacggcgaagatggctacttccacggtaaatgggcgcgcggcggtccggaaatcgtcaacaacttaggttgtgccgattgccataacaccgcctctccagagttcgccaaaggcaaaccggagttaaccctttcccgtccgtatgcggctcgcgcgatggaagccattggtaaaccttttgagaaagccggacgtttcgaccagcaaagcatggtttgcggtcagtgccatgtggagtattacttcgacggcaaaaacaaagcggttaaattcccgtgggatgacggcatgaaagtcgaaaatatggagcagtattacgacaaaattgccttctctgactggactaactccctgagcaaaacgccaatgctgaaagcgcagcacccggaatatgaaacctggacagcgggcattcacggtaaaaacaacgtgacctgtatcgactgccatatgccaaaagtgcagaacgccgaaggcaaactctacaccgaccataaaattggtaatccgtttgataacttcgcccagacttgtgcgaactgccatacccaggacaaagctgccttgcaaaaagtggtcgcggaacgtaagcagagcattaacgacctgaaaatcaaggttgaagatcaactggttcacgctcacttcgaagcgaaagcagcgctggatgcaggcgcgacggaagctgaaatgaagccaattcaggacgatatccgtcatgcccagtggcgctgggatctggcgatcgcttcccacggcattcatatgcacgcaccggaagaaggtttacggatgctcggtacggcgatggataaagcggcggatgcacgcaccaaactggcgcgcctgctggcgaccaaaggcatcacccatgaaatccagatcccggatatcagtaccaaagagaaagcccagcaggccattggcctgaacatggaacaaatcaaggccgagaagcaggacttcatcaaaacggtgatcccgcagtgggaagaacaggcacgtaaaaacggtctgttaagccaataaccccgttccgcctcgcaaggggcggaaaacacaatggagtgaatatgagcgtattacgtagcttattaactgccggggtgctggcgagcggcctgttgtggagcctgaacggaattaccgctacccctgcggcgcaggcatctgatgatcgctacgaagttacccagcagcgtaacccggatgccgcctgtctggactgtcataaaccagataccgaaggtatgcatggaaaacatgcttccgttatcaacccgaataacaaactgccggtcacctgcaccaactgtcacggccagccaagtccgcaacaccgcgaaggggtgaaagatgtgatgcgctttaacgagccgatgtacaaggttggagagcagaacagcgtctgtatgtcctgtcatctgccggaacagttgcaaaaagcgttctggccgcacgatgtccacgtaaccaaagtggcgtgcgccagctgccattccctgcatccacagcaagatacgatgcagacgttaagtgacaaaggacggattaagatttgcgtcgattgccacagcgatcagcgcaccaatccgaactttaacccggcgtctgttccgttgcttaaggagcagccatgacctggtctcgtcgccagtttctcaccggcgtcggcgtgctggcagccgtcagcggcaccgcagggcgcgtggtggcgaaaacgttgaatatcaatggggtgcgttacggcatggtgcatgacgagagcttatgcatcggctgtaccgcctgtatggatgcttgtcgggaagtgaacaaggtgccggaaggcgtcagccgcctgacgattattcgtagcgagccgcagggcgaatttcctgatgtgaaatatcgcttcttccgtaagtcttgccagcactgcgatcatgcgccgtgcgttgacgtctgcccgaccggtgcgtcttttcgcgatgctgccagtgggattgtcgatgttaatccggatctctgcgtcggttgtcagtactgcatcgccgcctgtccgtaccgcgtgcgctttatccatccggtcacgaagacggcggacaaatgcgatttctgccgtaagaccaatttgcaggccggtaagttgcccgcgtgcgttgaagcttgcccgaccaaggcgctgacgtttggcaatctggacgatcccaacagtgagattagccaactgctgcgccagaagcccacttaccgctacaagctggcgctgggaaccaaaccgaagctgtaccgcgtaccgtttaaatacggggaggtgagccaatgacgcagacttccgcatttcattttgaaagcctggtgtgggactggccgattgccatctacctgtttttgattggtatttctgctggtctggtgacgctggccgtgctgttacgtcgcttctacccgcaggcgggcggtgcagacagtacgttgctgcgcaccacgctgattgtcgggccgggcgcggtgatcctcggtctgttgatcctcgtcttccacctgacaagaccgtggaccttctggaagctgatgttccactacagttttaccagcgtgatgagcatgggggtgatgctgtttcagctctacatggtggtgctggtgctgtggctggcgaaaatctttgaacatgatttgcttgccctgcaacaacgctggttgccgaagctggggatcgtgcaaaaggttctgagcctgctgacgcccgttcatcgcggactggaaacattgatgctggtgctggcggtgttgttgggggcttataccggctttctgctgagcgcgctgaaaagctatccgttcctcaataacccgatcctgccggtgctgttcctcttctccggcatcagctccggtgcggcggtggcgctgatcgccatggcgatacgccaacgcagtaacccgcattccacggaagcgcagtttgtacaccgtatggaaatccctgtggtatggggtgaaatcttcctgctggtggcgttttttgtcggtctggcgctgggcgatgacggtaaagttcgtgcgctggtggcggcattaggtggcggtttctggacgtggtggttctggcttggtgtcgccgggctggggctgattgtgccaatgctgctcaaaccgtgggtcaatcgcagttccggcattcctgccgtgctggcggcgtgtggggccagtctggtcggcgtgttgatgctgcgctttttcattctctacgccggacagttgacggtggcgtaagccagaaaagaggtggtttctggacgtattccttcctgaagtcggttttctggcgttgttgttaagtctcggggtcaacgtgttgaccccgttgacggccttcgcgggagtgcggttgcgctggcctgccatgatgcgactcacttgcatcggcattctggcgcagttcgcgctcctgctgctcgcctttggcgtactgacgtattgttttctcatcagcgatttcagcgtcatttatgtcgcgcaacatagctatagcctgctgagctgggaactcaagctggcagcggtgtggggcggccatgaaggtagcctgctgctttgggtgctgctgctttccgcctggagcgcgctgtttgcctggcattatcggcagcaaaccgatccgctatttccgctgacgttagccgttttatctctcatgctcgccgcactgctactgtttgtggtgctgtggtccgatcccttcgtgcggatatttccaccagcaatcgaaggccgcgatctcaatccgatgctgcaacatcccggtcttatctttcatccaccgctgctttaccttggctatggcggtttgatggtagcggcgagcgtggcgctggcgagtctactgcgcggcgagtttgatggtgcctgcgcccgaatttgctggcgctgggcgttacctggctggagtgcattaacggcggggatcatcctcggttcctggtgggcctactgcgaactcggctggggcggctggtggttctgggatccggtggaaaacgcctctttattaccctggctttctgccactgcgctgctgcacagtttgtccctgacacgccagcgggggattttttgccactggagcctgttgctggcgatagttactctgatgctgagcctgctgggcaccttaattgtccgttctggcattctggttagcgttcatgcgttcgcgctggataacgtccgcgccgtgccgttgttcagcctgtttgcactgattagccttgcgtctctggctctgtatggctggcgagcgcgggacggtggcccggcggtgcattttagcgggttaagccgggaaatgttaatcctcgctacgctgttgctgttttgcgcagtgctactgatcgtgctggtgggaacgctttatccgatgatttacggcctgctgggctggggacgcctctccgttggcgcgccgtattttaaccgcgcgacgttaccgtttggtctgttgatgctggtggtgattgtgctggcgacgtttgtctctggcaaacgcgtgcagcttccggcgctggtagctcatgcgggcgtgctgttatttgccgctggggtcgtggtctccagcgtcagccgtcaggagatcagcctgaatttacagccgggtcagcaggtgacgctggcaggatacaccttccgttttgagtgcctcgatctacaagccaaaggcaattacaccagcgaaaaagcgatagtggcactgtttgaccatcagcaacgcattggtgaactgacgccggagcggcgtttttatgaagcacgccgtcaacaaatgatggaaccgagtattcgctggaacggcatccatgactggtatgcggtcatgggggagaaaactgggccggatcgttacgcttttcgtttgtatgtacaaagcggtgtgcgctggatctgggggggaggattgttgatgattgcgggcgcattgttaagcggatggcgggggaagaagcgcgatgaataaagggcttctcacgctactgctgttatttacctgttttgcgcacgctcaggtcgtagacacctggcaattcgccaatccgcaacaacagcaacaggcgttaaatattgccagccagttacgttgtccgcagtgccagaatcaaaacttactggaatccaacgcgccggtggctgtcagtatgcgccatcaggtttacagcatggtggcggaggggaagaacgaagtcgaaatcattggctggatgaccgaacgctacggagattttgttcgctataacccaccgttaacgggtcagacgctggtgttatgggcgctgccagtggtgttgttactgctgatggcactgatcctctggcgagtgagggcgaagcgatgaaacagcccaaaataccggtgaaaatgctgacaacactcacgatattgatggtatttctctgtgtcggcagttatctgttaagcccaaaatggcaggcggtacgtgcggagtatcagcgtcagcgcgatccgctacatcagtttgccagccagcaaaccccggaagcgcagcttcaggcattgcaggataaaatccgcgctaatccacaaaacagcgaacagtgggcgttactgggcgagtactatctgtggcaaaacgattacagcaatagcttgctggcgtaccgtcaggcgttgcaactacgtggtgagaacgctgaactgtatgcggcgctggcgacggtgctttattaccaggccagccagcatatgaccgcccagactcgcgcaatgatcgacaaggccctcgcgctggacagtaatgaaatcaccgccctgatgctgctggcttccgatgcgtttatgcaggcgaactacgcgcaagccatcgaactatggcaaaaagtgatggatctcaacagtccgcgagttaaccgaacacagctggttgagagcattaatatggcgaaattgttgcagcggagattggattaatcatctggtgatgaagattatgtcattgagctgcataaaaaataatcgaatgaacatatgccaaaaataatcactaatcagtattattgcagattaaacaaataaaaatctttccataacaaatggttattcattaatcctgccataaactcgcgttattatgcattaatgcagcgaaaagctctgttgttaaagggttgcgcaacataccgcgcaaatgatactgatcataagcgttaaaaaaatctacaaaccaacgcaacacaattcatgccccggcagtatgtcacgttctcgcgtttctgaacggggaacggcgctccattgaggaagtcattcatatgaaaaatataaaattcagcctggcctggcagattctgtttgctatggtgctgggcattctcctgggaagctacctgcactaccatagcgacagccgcgactggctggtcgtcaatttgctctctccggcgggtgatatcttcatccatctgattaaaatgattgttgtgccgattgtgatctccacgctggtggtgggtatcgcgggtgttggtgatgccaaacagctcgggcgtattggcgcgaaaaccattatctacttcgaggtgatcaccaccgtcgccatcattttggggatcactctggcgaacgtcttccagcccggtgccggggtggatatgagccagttggcgaccgtcgatatcagcaaatatcagagcactacggaagcggtacaaagcagttcccacggcattatgggcacgattttgagcctggtgccgacgaacattgtggcgagcatggcgaaaggcgaaatgctgccgatcatctttttcagcgtgctgtttggtctggggctttcttccctgcccgcgacgcatcgtgaaccgctggtgaccgtgttccgctccatctctgaaaccatgtttaaagtgactcacatggtgatgcgttatgcaccggtgggtgtgtttgcgctgattgcggtgacggtggctaactttggtttcagctctctgtggccactggcgaaactggtgctgctggtgcatttcgccattctgttcttcgcgctggtagtgctgggaattgtggcgcgcctgtgcgggttaagcgtctggatcctgattcgtattctgaaagatgagctgattctggcgtactccactgccagctctgaaagcgtgctgccgcgaattattgagaagatggaagcctacggagcaccggtgagcatcaccagtttcgtggtgccgaccggttactcttttaaccttgatggtagcacgctgtatcaaagtattgccgctatcttcatcgcgcagttgtatggcattgacctgtccatctggcaggaaatcattctggtgctgacgctgatggtgaccagcaaagggattgctggcgtgcctggcgtgagctttgtggtgttgctggcaacgctgggtagcgtaggtattccgctggaaggtctggcgtttattgctggtgttgaccgtatcctcgacatggcgcgtactgcgctgaacgtggtgggtaatgcgctggcggtgctggtgattgccaagtgggaacacaaatttgaccgtaagaaagcgctggcttatgagcgtgaagtgctgggcaaatttgataaaactgcggatcaataattgaagattgccggggatatccacccggcaatgtgtgaatgcctgatgcgacgcttgccgcgtcttatcaggcctacgccagacagcgcaatagcctgatttagcgtgattttgtaggtcggataaggcgtttatgccgcatccgacatcaacgcctgatgcgacgcttaacgcgtcttatcaggcctacgccagacagcgcaatagcctgatttagcgtgattttgtaggtcggataaggcgtttacgccgcatccgacatcaacgcctgatgcgacgcttgccgcgtcttatcaggcctacgccagacagcgcaatagcctgatttagcgtgattttgtaggtcggataaggcgtttatgccgcatccgacatcaacgcctgatgcgacgcttaacgcgtcttatcaggcctacgccagacagcgcaatagcctgatttagcgtgattttgtaggtcggataaggcgtttacgccgcatccgacatcaatgcctgatgcgacgcttgccgcgtcttatcaggcctatcttaaccgttggttaatttttcaaactcttcacacccggtatcaaacccttccatacagctcaggttcaaccagtgcagcgccttttgcttgttcttctcgataaaaccttcttcaccgtttaagaacatcattcccgcccagtactcggaataaccggttcgggaaattgcagagctgcgtttgaaataccaggttgccttgtcatcgtcggccttaatgcccacgccgttggcgtaaatcaaaccaagcagcatttgggcatcgacggcagagtcgttctccagatcttcgctggcgttttctaacaggctaattgcctttggataatccggtttacccgcttgagtatttaccagaatatgcgccagcgttacttcaccttctttactgcccgcttgcgccgctttctctgcaagaacttttgcttgtggatagtccagactgaccggattggtgattttgatctgcgccagcagcgcgcaggcatcagcatcaccgctgtcggcggctttctgtgcccaatattcggctttgctcaaatcgccggagctaaaccagctgtcggcaagaaaatattgtgcgcgtcggtccccggcctctgctgcctttaaatactggctgccaggctcggagtcgttggcgtgggcaaagaatgtcaaaaacaacatcaatgcgataatttttttcattttgataatacgattgggtagggagtaaccagtataaagagttcgaatggataaaaaaacagcctccgaaaggaggctgtagaaaggacggtattacgccagtgccgcttcgcgcaggcgagttttcaacttgttgtactcgtcaatcacgtactgctcggcggcgcgctgatcggcgatcggctcgacgcgaacggcgcagtatttgtactccggcgttttcgtaatcgggcttaagttttcggtaaccagctcgttacaggcaccaatccaccactggtaggtcatgtaaatcgcccctttgttcggacgatcgctgacctgcgcacgggtgataattttgcctttacggctgtgcacccaaaccaatgcctcatcttcaatacccagacgtttggcgtcttcggtattgatttgtgcgtagccaggttcatcagccagcgccgccagtgccgcacagttaccggtcatgctacggcaagagtagtgaccaacttcacgcaccgtactcagtaccatcgggtactcgtcggtgagtttgtcgattggcgctacccagtcgcaggtgaagaactgcgccagaccgttcggggtatcaaacttctctttaaacagataagaagtcccctgatcggcatcactagtatcgcggcaaggccactgaatgaagcccagttcgcccattttctcgtaagtcgcaccgtagaaatccgggcacagatgacgcaactcatcccagatctcctgggtgttgttgtagtgcatcggataacccatacgggtggcgatttcactgatgatttgccagtccgttttcagatcccatttcggttcaaccgccttgaagaaacgctggaagccacggtcagccgcagtaaacacgccttcatgctcgccccagctcgtactcggtaaaataacatccgccgcgctcgcggttttggtcataaagatgtcctgaacgataaccagttccagatcttcaaaggctttacgtactgcgctcagctccgcgtcagtttgtagcggatcttcgcccataatgtacgcggcacgcacttcgccatgcgctgcgcggtgcggcagctcgctgatgcgatagccggtatgcgctggcaggctttccacgccccaggctttggcgaatttctcgcggttagccggatctttcacgtactggtatcccggatacgtatccggcagcgcgcccatatcgcaggcaccctgaacgttgttctgaccacgaaccgggttaacacccgcatgcggcttaccgaggttaccggtcagcatcgcgaggctggtcagagaacgcacggtttccacgccctggtagaactgggttacacccatgccccacaggatggcggcgcttttcgcctgggcatacatccgtgccgcctgacgaatctcactggcgctgacgccggtgatatcttcaacgctctccggcgtgtagccttcaacgattttacgatactcttcaaagccttctgtacgactagcgacgaacgctttgtcgtacagattttcttcaataatgacatggcccatcgcattcaacagcgcgatgttgctgccgtttttcagtgcaatgtgcatgtcagcaatgcgcgcggtttcaattttgcgcggatcgcagacgataattttcgccccgttacgtttagcgttaattacgtgattcgccacgattgggtgggaatccgccgggttgtacccgaaaacgaacactaaatcggtattatcaatttcgttaatagcattgctcattgcgccattaccgacgctttggtgcagacctgcaacgcttgggccgtgtcagacacgagcgcagcagtcaacgttattggtaccaataacggcgcgcgcaaatttttgcattacatagttggtttcgttacccgtaccacggctggagccggtcgtctggatggcatccggaccgtacttctctttgatggcgctcaggcgctcggcaacgtaattcagtgcctcatcccaggaaacaggttcgagtttgccgccacgctggcgacggatcatgggggttttcaggcgcggggtcaggatctgggtatcgttaatgaagtcccagccataataacccttcagacacagggtaccctggttggttttcccctgcgctgcctccgcccggacgattttgccgttatcgacgaccaggttgattttgcaaccacttgcgcaataggggcaaaccgtgacgacttttttcatcggtctcgctccagttaatcaaatcacgcatacgcgctctcgactacagtatgcatcttttatgccacattttatgtggggtcattccctgatattacgggcactatttattcaaaactctgacgaaaaacaggctgtcgtcagttttgacgtgacgaaacgaaataccgcgtgacagccatcacgcggcagacattttattttttctcgacgacgggacctgcctgatacccgccgcccaggcttttcatcaactgaatgctttggatcacccggcggctgtccagcatcagtaaactcatctcttcggcaagcactggcaaccgggcttcggtggcctgtaagcggctggttaagccgcgctgataggcggcctcggcagcgcgctgggtaaagcgcgtggcttccacgcgttcagcctgcatttctcgctcgtcgttgagcgtttgcagacgcgtgccgttgacggcaacgtcacgcaccgcgttcagtacactctggttgtaacgttcaatcatcatgttgctggcggcgcgcgtgccttcgagattggcattcaaccgtccaccgtcaaacagcggcaatttcagacccgggatgaagttgaactggcgactggtttttttgaataaggtatgcagatggatggagtccagaccgaaaaacgctttgatatcaaagctcggatagaacaacgcccgcgcggaatccacctgatctaaactcgcctgaacataccagcgcatggcttgcagatccgggcgtctggcgagcaactcataagagagtgtcgccggaatgccggtctggacttgcggtaatgccaccggtctgatctccggcatatcgctggctcccgcgccaatcaatgcacgcagagattctcgcgtttcggtgatttgccctttgacggcaacaatttgtttatcgaccgccagaatctgtgcccgcgcgccgtggaaaggcacttgcgcttccagaccgtgcgccactttactctggtgcgctttcaccgcgtaatcaatcacatcgtgagtttgttctaacagatcgagcatctgatagctggcctgcatactgtaataaagctgcgctacgcccgtggccaggcttagctctactgctgcggtttctgccagcgcggcattatgcgcgccaatggcggcggcaaccgcactgcgatgcacaccccacaaatcaagatccagtccggcaaacaaacctactgtggcttccgtatagtacggcccgtccatacccagtgctggcgcatccatactataagggcttaaaaagccgttcgcgctgacacgttggcggttgagcatccctaacgctgcgacctgtaattgactaccggcatctaacaaatcggcctgggactgcgctttttcttcccgcagtttcgcttcggcgagggtgtgactaccacttagcgtccgttggatcagcgcatccagctgcgggtcattgagttgtttccaccactgcgcctgcggccagccggagctggcaagatgaatatcgtcggccagtttgatttgttccggtttgagctgttgatgaggtgcagaatccttacgtaccagggcacagccggaaatcagcgtcgtgctgccgagaatgctgcacaacagcagacgactaagttgacgattgatcattgcgtggctccttgtgcctgttccgtggcgggcgttaatgccggggctgtccagtctggcaagcgggcgaaaagctggcagacgtgttgctcctgttttaataaggtgggcaggatggcctgagaggcgggtgtctcttcaagcgttatttgaggagaacggctgagtgcggttgccagaccggcagcgtatttctccagggcgtcggcaaactgacctgctctgtccggctgtagtgcgttatccagcgcctgcgcgctgttccaggtggcatcccaggcgtgaagaagatcgcggccctgacgaataaccgtttggctacgttcaatcagtaatgcgcgttcttcgctgtccagttgacgctccagcgccacgcgttggcacatctcttcacaggcattaaacgccgcatgcagaccgatacgaatttgcagataagtgcgcagagccgtgacttcctgctggcgtgggatccgcattactttacttaacatacccagcgtgccagccagtttttgcggcagtgtgcgcgcttcactttcaggccagacaaaggtgtaaatcaccgcggacaccacggtaccaatgatgatacccagggcgcgatcgcgaatttccaccaggtcgtacactgggccaaaaacgttttcgagcgtggcgagcgcgaaggtgaccaccatctgtgtgccgatataagaagagcgttcagagctggtggcaatccatgcgcccaacaggaaaatcggtgccagcacaaacagcaattcgacaatattgtccagccagggcatgaccagtagcgtgaataacagcgccagaatcgcgccgcaaaaggccccgccaaaacgcagcaccatcttctggtagctgctaccgacatttgggttagcgacgatcacgcatgtcagcatacaggtgtgaatgccttcccagtccacgccgctgtaaaaggtgtaacagatcaaacaggcgagcagcgtttttaccgcgtagcgcatatagtctggattggtaaaagcatcggcggccatacttggcggtttggctgcgggcgttggcggcgtattcgggtccatctgacccagttgtaacaacgtctggcagatattctccaggttacattcccgtgccgccatcgcttcactttcactgatccgccagtcgctttgccagcactgaccttcagcaacggcatgctgcagcttgttgatttcactagctaatttttgtcggaattcaataattgcctgagaatcagcaaaagaggtgggatcgtagcgattcagcgtgctgtaaatgtaggttaccgttgccacgcagctttgccaccatgcgttttgagttcgccagttggcatcgtccgcgaggcaaaagacattgagtttttgtagcgccagcgcctctctttcaatccgcgtttcgggtagcggtgcgaggctgtctgtcaggtgactaatggcatcatcaagccgatcattaagcgcctgatgcatttggctaatggcacgactgggaaaccacagcacgccgattaacgtcatcagcaaggttggatagaggccaacaacgatacaccacagcgttaagcgcacgaccacttccggatagtcgagcatggcggggaaggtttgcccgtaaatagcgacaatggcgacggcgaaaaagaccagccccaagcgatgggtgcgcatcaaaaacatgcagcccatcaggatcggtccggcgatgatcaatcggatcaacggttcgccgtaactccatttgtagatcaaaaacaggctgccgatctccagcaccgtggcaaccacaaacaagatcgcgacaaatttggtgtaaaacgcgttgctctgaataccgtaaaacagcactgccaggcttaacgccacaaaagggatctcaaaggtcatgctgatcagaatcaccagcaggcagcctacccagagttgcacggtctgcggcacgcgacctggtcgccgctcgcttaactcttcatgaaagaacgccagcagcctgaccaccggtaatggcagggagttgagcgcgctcattattgcggctcaagattagcgactgcgctagcgccgatgcggaacatttccgggtcaggtttatcgaccatgattttgaccggaaaacgctgggcaacgcggacccagttaatagaacgagacactttcggcaggccgcccagcaccaggccgccgtcatccggtagcacgccgtagccaatgctatccactttaccctcgaaggttttgccgctgtcactcatcaggcgaatcgttgcgggtgtaccactgcgaatatttttcagatcggtttcgcggaagttggcgatcacataccagtgacgagtgtcgattagggtaaaaatagggcgcatggcagaagcaaattgcccgacggaggttttgagggaaatgacccggccatcaaacggcgcgcgaacggtcgccatttccagatgcagtttggtcagggcaatatccgcttcgaccgccgcacgctgggcaactaatgcatccacgccgctgacggcgctggcggcactctgcgcctgtaacaatacggcattaagatccgcttctgcggcgcgctgcgccgttcttgcacggtcaacatcttccgcactgacaaaaccttctttcagtaatggctcggtgcggcgtaatgtatctgtggcctgtttcgcggcggcacgggctttttctaccgtggcattaacgctgtcggcaccaaactgttgcgcgtcaacgctacgctgggtgagcataatttgcttatccagcgccgcgagggaggcttcagctttcgccagattggcttcgtacgggcgcgggtcgatgcggaacagcaaatcgccctgtttgactgcctggttgtcggtgaccgccagttctacaatgcggccgctgacttccggtaccacatcaatggtatctgcactcgcgtaagcgtcattagtacttggcgcactgtctacgcgccagataacgaaaacaagggcaaccagcgccaacgcaaccactaacagagcagggaatttactgcgaggagcttttttcggcgtactttccatgagcgcgtctcaaatagattagaaaaatgccagccagaacagcatggcgtagagagcaaaaagggcggtataaataattccgacaaatgccagattgatatttgcccgctgaataactcgcctcgtgatgagcgtcaaaataaggctggcaatggcgcagaaaaaccagctgggataataagcgccgatcaccgggattgccggagataatgagcatcccgaaaccatgaagacgggaattatccaggctgtttttttgagttgcatcgccatgcgagagagaactgttggcatattaaatacatcctgtctgctgcgaacaatatctgtagtgaatatcaatatccattgaaggcgtcagtatggctattttcttgatgaataaaaatagctttattcagccaccgcattcataacttatatattttatttattaattggctgtatatatttttaaaataaatacttttgggggcttcagcgcccccaaaagcgagtgacattaatttggggttacgatattcacccacaaatcgaaattatccagacaggcgataatttcttccagtttcgcgccattgccaataattttggctttcttcgcttttaccagatccgccattttggcttgtccggtcagcacggcgtgcagatcttcacggctgatgtagaaagaggcgtcggcttgcggttgcagcgttttccggtagttaagcacgctatcgttcagcgtcaggttgaggttatcgccgttgctcatattgaagttcaggctgatatttttacccgcagctttcgcgctatcgaggcgaacggccataaagtcgaacagcatttcgacgctcatcccgcgaatggtgtccggggaaccggtggtgccgtggctgaacttatgcaccccttcgcgcagctctttcgcgccggtcaggtagaaaccgcgccatgtggcggactcggcctgatagcccagctgttcaaagttattcgcttgcagattcttcgcgacctggtcacccgggttggcggcaatcacctgtttcagcagttctgcgctccagcggtaatcaccttgcttgttcgcttcttgcgccaggttgatgacacgggcagaaccgcccagcgcctgcacgtaacgtttacccatctccacctgaccatacggatgcaggttagccgggttaccgtcgtaatagccaagatagaagttatacaccgcgcgggcgttgtggctgacagaaccgtaatagccgcggctggcccagttattggcaagtgcaggcggcagcttaatcatgtcgccgatttcattcatggtgtagccctggttcgccaggtgcagggtctggtcgtgaatgtacttgatggtatcgcggtatttaccaatataatcattgatatgcttattgccccagaccggccaggtgtgcggcataaacagcacttccgcgtcgttaccccacatatccagcgtttcgttcagatactcggtccacttgctggtgtcgcgggttttcgcgccgcgcagagtgtagaagttgtgcagggtatgcgtggcgttctcggcggtacacagggctttcagggccggaatatagaagtgcatttcggctggcgcttcgctacctggggtcatcaggaagtcaaactccaggccgtcgataatcatcttctcgccagttctgacgatagttttcgtcggtgcaataatgctcgggtcgcccgttgccagcgtcacgccaaggccattacccacattgccttgcgcgttgtgcggcagtaacagaccgtaagagtagagcgcacggcggctcatgatgttacccgccagcacgttttcgctgatggcttcgtccataaagcctgcaggggcaatcacctgaactttgccggatttaacatcggcttcagagataatgcctttcacgccaccatagtggtcggtgtggctgtgagtgtagataacggcaacaatcggtttttgcggacgatgctggaagtaaaggtcaagtgcggcttttgcggcaggcggcgtcaccagcgggtcgataacaataatgcctttctcgccctcaacgaacgtaatgttagagatatcctggccgcgcacctgatacattttatcggtgactttgaacaggccagaaataccgttgatttggctctgacgccacaggctggggtttacggtttccggcgctgcggcattaatatcaaatttgtaatcgtccgcgcggtagtaaactttaccgttcgcatcacgcagaataccttcatccagcagcggggcgataaatccacgctgggcatcgtcaaaatcctgacgatcgctaaacggtaaacttttggcgtaattctgattaacctgttgggtatattgagtggcggctttcgcttcctctttcgcgttagcggtatttaccatcatgccgctggcggcagttaacgcaataacaatcctgctcaaacggaataaccgagagttattcatataaatctccatttatcatttatgtcgtaaatatgtaatccatgcaaaatacgtcatttaaagctggcgttatcataattgggaaattgcgactttaataagtggaagtgtgagcggaacgcgccattttattaggcatttgtgctgaagagggaaaattacagtaaaactatcattgcagaaaataatatgagtcgttttatgtgtttattatatatattgtacctgtcgttggcacagcgggacattgcgctactgtgccaacgttttactcatggggctttagcacagaactgtggcaaaaaacgttgatgcgccaatattgctgcaccctgagcgccattaaagtcagaagaactggcggcaataaagcgcacgacctgatgcggcagtggacggcgcaggtacttttgggtcatggcaacgagagtctcgcgtgggaaggcgggcatatccatcacgccaccgcccaggatcaccgcatcgggatcgaacagattaatgctggtggcaatggcccgtgccgcgttttcaagcagactctggacgaaaggggcgttttccgcatggacgaaaagatcgcgcaatgggtaatttcggggctgttgttcgtaccagcgtcttagcgccattccagagcaattggtttccaggcacccaggattgccacacgcgcagtgttgggtcatatctcccagggggatatgacccagttcgcctgccacaccgtgtgcacccgtccacggcgcaccgttcatccacactgcgaaccccatccccgtaccgagataggccgccagaaccagttgttgcgtaaggcggttttctactacgtcccaggagagttgcaggttaacgtcgcgggaaaactcaaccggacaattcagcgtattttcgagcttatcggcgagatcatataaatccgccgctgttaacggcaggttaggcgtagaaataatggtgcgtttatctttactgaccagcgccggaaatcccatcaccagaccatgacagcgagcgttaaagcgcctgagttgctcgtcaatcatttcgccgataccgctcaccaggccgggagcaatgacttctgcggtccgctttttttcgcagtgtagcgtttcaccttctgctgtccgcagacaaaagcggatatgcgttgcccccatatccacgcccgctacgacgttatgctgtttttgcatgaggctgtacctcgctttttgcagccagaatctgcgcggtcataattctccatgcttcgtcgatattttccgcatgattaaacaggccggaagtgccgacgataaagacatccgcccctgccgccatcagtttttcgtaagttgcctggttgcaggaaccgtccacctcaatttcgtactccagaccttctcgttcacgccatgccttcagttcggcaagtttatccagcatttcaggaatgaacggttgtccggcaaagccgggatcgacagtcatgaccgtaattttatcggccttatggatatagtatttcatggcctcaactggcgtctccgggttaaggatcagccccactttcatgtcatgacggcggatttcatcaatcaggcggaacgcctggccgttgatggtttccggatgcagagtgatgaaatctgctcccgcacgcgccagttgagcaatgtaatcctgcggccgcgtcaccatcagatgacagtcgagcggtttagttgccagttttttaacctgacttacgaagaacggactgagtgtcagattggggacaaagtgaccgtccatgatatcgatgtggaagtaatcggcatggctgtcgataaattcgatctgttctttaaatttcagcagatccatacacattaagctgggggagattttcatgttcaattccttacttactgataagacggtcaagggcgacagccgcgataattaatccgcccatcaccaccagttggtaataggtttgtacctgcaaaatattcagaccgttgttgatggtgccgatgatcaacccgccaatcaccacagagaaaatgcgccccttgccgccgaagaaactggtgccgccaatgatggcgctggcaatggcataggtttcaaaacccataccggcaagcggttctgcggcaccgagtcgtgcagtactgacgacgcctgccagacctgcacaaacaccggagatgataaacaccaccaggatgtggaatttcacgtcaatcccggaatagaacgcgctatttttgttgccgcccagtgcgtagatgttgcgcccgagccgcatacgcgttgtcagaaaccaaaggatgagcgcgacaattagactgaagataacggggacaggtatcccaattacgctggcggcaaagaagttcacgaagtcaaaactgaagccgtatacgctgttggcatcggagatcaccagcgtgatcccacggaaaatcgcgttggtgccaagggtgatgatgaacgggtgtagccccgtccagttgaccaggcagccgttgatcgcccccagtgcgccgccaaccagtacaccgccaatcatcgctgcgagaaacgggtcaacacctgccaacatcagtttggcggtcaccataccggaaagcgccagaatcgcgccaacgctgaggtcgataccagcgaccaggatagcgaaaaactcgcccatgccgatcaataccgtcacggagctttgaacaaaaatctgggtaatattattggtggtcagaaaatattctggactcaggctaccaaagatggcgacgatgatcgccaggataaaaaaggtgccgtatttatcccagaacagcgcaaagttgaacggtttcttctcgctcgcttcgctttttactcttgtggtaaagcccatgccataatctcctcttcgctcatgtcatcgcgattcgtcaggatttgcgtcagtcgtccttcgcagaacacggcgatgcggtcgcagacggtgataatttcaggtagttcagaactcaccatcaggatgacttttccgtcgtccgccagttggcgcatcactttgtaaatttcggctttcgcgccaacgtcgatgccgcgggtaggttcatcgaaaataatcacttccgggcaacagcacagccatttggagatcaggactttctgctgatttcccccggagagttcggtgatattctggtttacgctatgacatttcagcgccagcagttcgcgttgattttcagcggtacgttgctcgtcaacttcatgaaacaagcccatcgcgcctttatagccgccgtctttcagactgcggctgatcgccatgttctgagcgatggaaaagttggggaaaaaaccgttatcccggcggctttcagtgatgtaagccatcccttttttcacggcatccaggggactacgtggagagatatctttgccattaagacggatttctccgccagcgcgtttatccacgccaaacagacaattcatcagttcagtacgtccggaaccgaccagtccggcaaagcctaatatttctccccggcagacgctaaaactgatatcccggaccttttttctgtcacgactggtgacgttccgcacctcaaaaaccgtttcgtgcgcaaggttgctgacattctccttcatcgcgttaaaacggttttgcagttcgcggcctaccatcagacggacgatatcgtcattactcacatcgcttactatgccgctgcaaacgctgctgccgtctttcatcaccgtatagcggtcgcaaatacggcgaatttccgccaacttatggctgatatagacgatggccgtaccctctttacgcaactgattcatgatcagaaacagatagtccacctctttattggtgagactggaggtgggttcatccatgatgatgactttggcatcgagcatcagcgttttggcaatttctagcatctgcttgtggctgatagataaattcgccactttctcatctagatcaactttcaagcccacgcgtaataacatcatggcggcgcggacacgcatttctcgccagtcgataatattgacgccacagatttttttcgtcagatgacgaccaatatataaattttccagtacggttaattcatcaataacgctgagttcctgataaataatcccgataccgagttgtgccgctaatttatgatccagcttgttatagctaatgttattaatggtaatggtgcctttggtcggctcatgtattccggataaaactttcattagcgtggatttacccgcgccattttctcctagtaatgcatgtatttcaccaggataaaccgttaaattaacgctctttaatgcgtgaaccggaccaaaggacttgccgatccccgccatgcttatatatggcgtggccataaataacctctctgcacgaaatatcgtattattgcctgatggctacatttatcaggtctacgttcaggttattttgttggccggataagacacttcattagcatcatcatccggcatcattcagttttattgagtgaccaggatactatcgaccagtttaaattccggtgctttatccagcgggataaccttgccggatttctcagcgtcaaccatcagcttcagacccgttgcgccgatatccgccgggttctgggcaaccgtcgcggtcatttgtccggcttccaccattttgcgggcttccggaatgccatctgtaccgacgaccagcacttttcccgtttttccggcgtttgcgactgcctgagcaacacccattgccatcgtgtcattcgcgcaatagatcgctttaatattcggattacgttgcaacacgttagtggcgacatccagtgctttaatgcggtcccagtcggcaggctggctggcgacaagcttgatctggcttgcttttttgaaggcttcggtggcaccattacgacgcgcttcaccggaggcgttaccggctttaccctcaatgattgcgacttcaccaccttcagcgcccaatttgtcaataatgaagctcgcgcctttcgccccgacagcaacgttatcggtggtgacaaaagcttccacattgccgccagcttttttcagattatccatgtcgattttttcatcgagattaaccagataaatgccttttttccatgcgcgggcgacaggcatgaccagattcacactggataatggagcgaaggcgatacctttgtaatttttattactgagatcttcaaataactgcaattgagattgaaaatcgccttcactaggagaggcaaaaatatcaacgctgacgcccagtgtttttgcttcatcttcaatgccttttttcatatctacccaaaatgggttggagagggttttcaatacgacagcatattcggcggcagcaaaagcgctggtactcaacattaagcccacgagtgtgccgctgaaatatttcagatatttattcataataatgttctcacggtaaggggacaggtaactccgcgatggcggaattacctttttcttatttcagcgcgcctggactgaagaaatcaacaattgcgccggttttttgcatattaatattagcttgttcaatgttgagctgggcgacagagacaaaaaaagcgtccagcaaagttagttgtaatattcttgcgctggcattacgacctaataacggcgtttccggggctggactgcaaataatataatcggccagtttcgctatcggactatggtagctatgggttatacaaataatctttgccccgttcttttttgccagttctacggccgcttttacatcactggttcgcccggaatgggtcactaccagcacaacatctccttcctgtaacaagctagcggacatcatcatgatgtgagcatcaggataggcctgacagcgtacgccaatgcgcaagaacttgtgctgtacatcagcacagatagcattacttcctccggcaccgtacaaatcccgctgtctggcctgatagaaaaagcgggcggcacggtggatctcatcaacgttgacgatgctctgaccttccataatggtgcgtaaagtgatgttaaataccttattcaccacatcctgcggcgcttcatcaaaagccaactcggaaggcaatacctgttcactctgagaaaaataatcttccagcgcactgcgtaagttacgaaagccgctaaaccccagcagcttacttaccttaactatcatcgcttcagataccgccagagcttctgcgacatctttaattgcgggtgcacaactcaggttaccgggtttgagtaaccactccacgatgcggctttcattttctgtcattccttcctgcttcattcgcaggtaaggcgctaaccctataccgttcggaagcgcactatcaaactcactctggctcatcacgttctcttgtccttgaattgaagacgccactatatcaccacagcaagaacagaaaagatgctggcgacttcacaaaaaaataaaatttataaagtttattttattgtgaacaatggcgagtggcttaaaattttatttcatttaattagtttaaaaacatgatgttatttgtttttctggttttttagatgatagatgttgctggatggtgagtgtctttaacgctattgcgctgtcagatgtaactctgtaaaacagatcaggaaggcgtaattcatcgattttgggtgtttttaattcattaacatcacaaatgttttttgattgtgaagttttgcacggacggggaagatgaatgaaaaagattgcatttggctgtgatcatgtcggtttcattttaaaacatgaaatagtggcacatttagttgagcgtggcgttgaagtgattgataaaggaacctggagcagtgagcgtactgattatccacattacgccagtcaagtcgcactggctgttgctggcggagaggttgatggcgggattttgatttgtggtactggcgtcggtattagcatagcggcgaacaagtttgccggaattcgcgcggtcgtctgtagcgaaccttattccgcgcaacttagccggcagcataacgacaccaacgtgctggcttttggtagtcgagtggttggcctcgaactggcaaaaatgattgtggatgcgtggctgggcgcacagtacgaaggcggtcgtcatcaacaacgcgtggaggcgattacggcaatagagcagcggagaaattgagattcatccactacttgcatggatgagtaatgattaatgtggatagagtttctttttgaggttggctaatgaaacgctttccgctatttcttttattcaccctgctcacgctgtccaccgttccggcccaggccgatattatcgacgacaccattggcaatattcagcaggcgattaatgacgcttataaccctgaccgtgggcgagactatgaagatagccgcgacgacggctggcagcgtgaagtgagcgacgatcggcgcagacaatatgacgaccgccgccgccagtttgaagatcgccgcaggcagctggacgatcgccagcgccagcttgatcaggagcgtcggcaactggaggatgaagagcggagaatggaagatgagtatgggcgatgaggttgggtatggagcaggcatcgcccctcaccccaatggggagagggagaaaacgagcgcaatattcaatatcgagcacaatcggtcccctcgcccctctggggagagggttagggtgagggggccagcgcgcacattccctctcatcacgccaccccaatctccatcccatcaaaccccacctcaaacccactcggtagtgcgttttccatcagccacgcatcaaactggtggctgatatgggtcagaatcacccgtgggctgcggataacctgattcagcgcaagcacggtatttaaatcacagtgattacgcggtgcatccgcgcgcggcgggtgactgcaatccatcaccattacctgcggctgattattgcgtaaaaatttcagcgttttttccggcaagcctgcggtgtcagacagccacgccacccggctgtgtgccgtttccagcagataaccgaaggtcagtttactgtggttgagcggcaggggcgtgacctgtaacccctgcaaatcaaacaccacaaacggttccaccgtgtggctgaaatcaagcaggcccggatgtttaaacagatcgtcgcagccctgttcatccggcgggccgtaaaccgggatcggatcgccaacgccccagcgcagcggaaacagcccctggacgtgatccatatgataatgcgtcagcaaaaactgctggaagcttccggggctccagcgatcggcgagatcgtgcagcccggcgtcgatcagggtgattgcgtcgttaaacttcactacgccgctgcacggttggcggcgatactgcgggctgcgccgcgctctggcgcaggccgcacactcgcagccccatgccggaacgccctgtgcgccgccggtgccggtgagcgtgagggtcaggctcatgttacagcgccttggtgaagcggaagtggctctgctcgtagccttcgcgcagatagaaacggtgcgcgtcgtggcgcttcacgttggtgctaagttcggtcatttcggccccggcctggcgggcttcttcttctgcccacgccagtaacttactgccgacgttcagaccgcgcgcctgcggcattaccaccaactcctgaatttcgccgatccagttgacatgatgcagatgaaactgcaaatgcaggccgatcatgccgacaacttcgccatcaagcagcgccagatggtagcgcatgtttgggtcgcgcagattggcgttaaaacccacgcgaaacgcgtggtggtcaaactccgcctgttttagctcacaaatcagcgcgtaaaccgcgtcggtgtcgtactgcgtggccgggcgaagctcacaagcaggcatggtgtttctccttctgatggatcagcgtcagcagcgtgtcgacgctctggcgcaggctgccgtcattgttgagcgtatggcaatcctgtggagtatagcgggcggcgcgcgccaggcgggcgttaatttcactggcgttttcacggccacggttttccaggcgctggcggaggatctccgggctaacctgtaaacagacgggcagcagcgcgctttgatagcgcgcccgcgcctgcggcagatgggcgcgactgccgttgaccagcacgtcgaatccggcgtgcagccagagatcaatctcgacgccgacgccataatacagaccgttagcgtgccagcttaaggccaacagattttgccccgcgcgggtaaaaaactcctgctcgctcagggcgatatggttttcacttccggcgctggcatcgcgcgtgatgtagcgatgcgccaccagtaactgagtttgttcccgcaggcggagttccgccagcaggctgtctttcccggagccggacggccccattaaccaaatcagttttcccatcatcagaacacccttttaccctgacgccagacgtggtcgatatgaatatgattgtccttgcgatgcgccagcaccaggtcggcgcgtttgccctcgccaatcaccccgcgatcctggagattaagcgcctgcgctggatttttagtcaccagcttcaccgcctgcggcagcgtaaagcggttgctctggtcatcggcgacgcgaaatgccgcatcgagcaggctggcggggtagtagtcggaagagaggatatccagcaggccaagctgcgccagttcactggccgccacgttgccggagtggctgccgccgcgcacaatattcggcgcgcccatcagcacgttcatgccatgcttgcggctggcttccgccgcttcgaacgtggtgggaaattcggcgatcacgctgccaagctggtgagattcagcaacgtgggcgtgggtggcgtcatcgtggctggcaagcgcaatttttcgcgcgcggcacagggcggcgatggattcgcgattcggctggctccagcgtgcggcgagcgccagttgctcttcttcgtactgctgcatctgcgcatcagtgagggagtatttgccctgataatattcgcgatacttctcgcggttggcgaactggcgctggcccgggctgtggtccatcaggctcaccagcgtcaccggctcgcgctgcaccagtttttcaaacagcggcagcgtggtgtgatgcggcagttcgcagcgcagatgcagacggtgctcggcgcggttgacgccgcgtttctgcgtctcttcgatggcgttgatcatcttctccagattctccagccgatcgccgccgtcgcgcacgtcgccaattgccacggcatccagtacggtggtgatgccgctcgccaccatcagcgcgtcgtggctgctcatcgcgctgtgggcaggccagtcaactttcgggcgcggggtgaagaatttatccagattatcggtatgcagctcaatcagccccggcagcagccagccgccttcgccgtccatcgcctccggcaggcggctctggctttcggcaaaggcgcggatttcgccgttctgcacctccaggctaccgcttaccacctcgttttccagcaccagcttaacgttattgataatcatgaagaggctcccattgggtgttagctcaactagaggctcccattgggtgcaggcggtcggcgacgtcattacgtacagcttcgtcatggaagatgcctacgatggctgcgccacgggttttggcttcgcgaatcagttccaccaccgcggcgctgtttttggcgtccaggctggcggtaggttcgtcaagcagcagaatggggtagtcgacgataaagccgcgggcgatgttgacgcgctgctgttcgccaccggaaaatgtgcttggtgccaggtgccacaggcgttccggcacgttcaggcgggtgagaagacgcgcggctttagcggcgcaggcttcacgcggaacgccggtatcgagcagcggctgcatcaccacttccagtgcactgatacgcgggatgacgcgcagaaactggctcacccagccgacggtggttttgcggatttccaccactttgcgcgctggcgcggtgaccaggtctacccactcgtcaccgtgtttgatctggatttgaccttcgtcgggcagatagttggcgtacaggctgcgtagcagagtacttttgccgctgccggaatggccgtggagcaccacgcattcgcccgcgttgacggtgaggctggcgcgattgaggacgggcaggcgcacgccgttttgctggtgcaggatgaaggttttactgacgttttgtacgttaatcatttttcgcctcgtggttcgggtgtcggatgcgacgctgacgcgtcttatccgacctacggggagcgcatttgtaggccggataaggcgtttacgccgcatccggcaccggctcaattctgcaaaacgctactcaccagcagctgtgtatacggatgatgcgggtcgtcgagcacgcggtcggttaacccactctccaccacttgcccctgcttcatcaccagcaaacggtccgccagcaggcgggcgacgcctaaatcatgggtgacaatcaccaccgcgaggttcagctccaccaccaggccgcgcagcaggtcgagcaggcgggcctgcacgctcacatccagcccgccggtcggttcatccataaacaccagcttcggatgcgtcaccaggttgcgggcaatctgcaaacgctgctgcataccgccggaaaaggtggtcggcaggtcgtcgatccggttggcgggaatctccacctcttccagccacttctgcgcggtggcacgaatatcgccgtaatgacgtgccccggtcgccatcagccgctcgccgatattgccgcctgcgctcacctggcggcgcaggccgtcgagtggatgctgatgcaccacgccccattcggtacgcagcaggcgacggcggtcggcctcgctcattgcatacaggctacggttctcgtagtgaatttccccctgctgcggcgtcaggcgcgcggagatgctcttcagcagcgtggtcttcccggagccggattccccgacaatgcccagcacttcccccggccataaatcaaaagagacatcgctaaagcctttgcccggcgcgtaaaggtgggtcaggttattgacgctaagtaacggttgattcattggttttttgcctcgctctgttggcggcaataatcggtatcggagcagacaaacatgcggtttccggcgtcatccagcaccacttcatcaagatagctgtgggtgcttccgcagatggcgcatggctcatcccactgctgaacggtgaacgggtgatcgtcgaaatcgagactttccacgcgggtaaacggcggcaccgcatagatgcgcttctcgcgccccgcgccgaacagttgcagggcgggcatcatgtccatttttgggttatcgaatttcgggatcgggctcgggtccatcacgtagcgcccatttaccttcaccggataggcgtaggtggtggcgatatgaccgaagcgggcgatatcttcatacagtttcacctgcatcacgccgtactcttccagcgcgtgcatggtgcgggtttccgtttcgcgcggctcgataaagcgcagcggctcggggattggcacctggaagataattatctgatcttcggtcagcggcgtttcggggatgcggtgacgcgtctggataaccgtcgcatcgtccgtacgttccgtggtgtttaccccggtcacgcgcttgaagaagttgcgaatgctcacggcgttggtggtgtcatccgcgccctggtcaatcaccttcagcacgtcgctttcgccaatcacgctggcggtaagctgaatgccgccggttccccagccgtacggcatcggcatctcgcgcccgccaaacggcacctgataaccggggatcgccaccgcttttaagatggcgcggcggatcatgcgtttggtctgctcgtcgaggtaggcaaagttgtagccgctcagattagccatggttctgctcctgttgcagacgtttgagtagctccagttcggcctggaaatcgacgtagtgggggagtttgaggtgactgacaaagcctgcggcttcgacgttgtcggcatgtgccagcacgaactcttcatcctgcgccgggcctgtcgcgtgctcgccgtactccggggcttgcagagcgcggtcgaccagcgccatcgccatcgctttgcgctcgctcatgccgaacaccagcccgtagccgcgcgtgaagtgcggcggctcacccggcgggtcgataaaaccgttaaccatttcacactcagtcatcagcagttcgccgacgttcaccgcaaatcccagctcttccggcacaatgctcacgtcgatatagccgctgcggatctcgcctgcgaacgggtgattgcgcccgtaaccgcgttgggtggagtaggccagcgccagcaaatagccttcgtcgccgcgcatcaactgctgcaaacgggaggagcgactgcaggggtaaaccggcggcgtgcgggtgatgtcatccggctgtgcgccgctatcctcttcaaacttcgccagcccctgacgcgccagcaggctgaaaacgtgcgggctcggctgctgttcgctgtcggcggtggtcagcgtcggcgcttcgccgtttgccagcagggtaaaatcgagcaggcgatgggtgtagtcgtaggttgggccaagcagctggccgccgggaatgtctttataaacggcggagatacggcgttcgagacgcatcccggtggtgtcgagcggctcgcttaccgccagcttcgccaacgtggtgcggtaggcgcgcagcaggaaaatcgcttcaacgttatcgccgctggcctgtttcagcgccagcgccgccagttcgcggtcggcaatgccgccttcggtcatcacgcgatctaccgcgaggttaagctgctgttcaatctgggcgacgctcagttcgggcaaatcggtatcgcctcggcgtcggctctcttgcagggcgtgggcggcgtcgatcgccttctcgccccctttcacggcaacgtacatcagcacacctccacatgagtggttcgcggaatagccagcaggcgctcgccacaggtcaggatcaggtcgatgccgagcgggaacggatgcgggcgctcggtgagttcgtgcagaatgcactccggcagctgcggagcgatcattcgttcttcggcaatacccgcaccagtaaggcgcaacatgcgtccgccgctcaggctggcgacctgtaaaatcagcgtcgcacccgcttccggcgcaacggcggtgccggtggaaagggcgttgagctgttcgctggaaatcgcctcatccgtcaccgcgaaggtcgcctgttccggctggctgaccagcggcgcgttggtatgaaaacgcaggctctggttgacgatatcgttatttaatggggtagaaagccacaccggcgtgtcgttatcggccagcgtcagcagcacgctggtggtggcgatattcagcggttgccagccgcgtttgagctgatgcagggcgacaatcacgcccggctcgctcatggcctttaacaggcgacgaaaactgtgctgggcatcctgcacgggaagcataaaagcggtttccagggtcatgcgttgtctccgcgaaccatcgtaaagaagtcgacccggctggcgttcacttcggcctggcgtgcggcaatgcgtgccatacggtcagcgtccagcggggcaataagggtttcacttaagttttgaaagtggcgagattgctgcatcagcgcgtcaatcagcgcgcagcgttcggcgtgctgtttatcacgcccctgcacccagctgtagccgagcgtgccgtcagtcaggcgcacggcggcgcgggtcagcgtggcgtcgccggcaaaaaaacgttcgccggtgccgcccatccgcgcctgaatctgtaccaggccagtttcagcggcgcggatcacctcatagtcggcggtgatgtttagcgcgttcaggcgtgctgccagttcagccggttggctgtgcgccagcacggacatccagtgctggcgggtcgcggtatctgcgtgcattcagtgctccatagtgaattcaatcatgtcggcgcgcgtcaggctgacggagtactccgccgggctgctttcaccgtcacggtggttaagggtgcgcacgcacagcagcgggctcatattcgggatttcaagacgctggcactctttggcctgggcgcggcgggcgctgatccgcgtctggctgcggcgcagcgcaattccggtttgctcgcgcagaaaatcgtgcaggctgccgctgtcgaagcgttgcagcgtcggccagagggtgaggtccgcgaagtagtggtcgattaaacagagcgcgacgccgttgacacgacgcagggtgcgcaggtggatgacgttctccccctcggtaatccccagtgcgtcagcgacgtggccggacgcggggcgcaatacgctaagcagtttttcgctggtgggatggctgccctgatccagcagattctggctaaaacgcgcctgggcgttgagcgggtaatcgaacgggcgcatcagcaccagcacgccgacgccctgacggcgctgtacccagcctttttccaccagttggtcgatggcgcggcgcagggtgtggcgattcacctcaaagcgcgctgccagttgctgctcggcgggaagatagtcgccgcagcggtagtgttgacgaagctcctgctcaagttttgcggctatctcttgatagcgtgttgggtagctggtcggatgtgtagacaagtgcatagatatcaatgcctcgcttatcagataaagtgcttacgcaaccgttgagagaggaaatccagcaggctgaccgtgacgatgataagcaccatcagggcgcaggtttgttggaactggaaaccgcgaatcgcttcccacagggtgacgccgatcccgcctgcgccgaccatgccgacgacggtcgccgagcggacgttggattcgaagcgatagagggagtaggagatcagcagtggcatcacctgtggcagcacgccgtagaggatctcttcgagcttgttggcaccggtggcgcgaatgccttccaccgggccgggctcaatcgcttccaccgcttcggaaagcagcttggagagcacgccggtggtgtggataaacagcgccagcacgccagcacgccagcgaacgggccgaggccgacggcgaccacgaacagcatggcgaagaccatttcgttaatggcgcggcaggcgtccatcaggcggcgaacgggctggtaaacccaccacggcaccaggttttcggcgctcatcaggccaaaggggatggagagaaccaccgccagcgcggtgccccagacggcgatttgcagcgtgacggccatttcggtgaggtaatcctgccactggctgaaatcgggcgggaagaagtcggcggcgaacgtcgccatgttgccgccgtctttgatcagcgtaagcggggccatttccgcgccctgccacgagacgaccaacacggcgagtacaacggcccagctcagaagcgagaaccagctgcgcttgggtggggcgatggtgatggtttgcatgtttggctccggtctgtaggccggataaggtgcttgcaccgcatccggcatcaacgcctgcacattgtcggatgcgacgccggggcgtcttatccgacctacgatttactgcaccgctttactcacgctactcatcgcgcttagcgcgttgttcaggcggtccaggtcatccagctgcgcctgaatctcggtggtttttgccagcttgtcctgctcattcagtcctttattgcttttcacgccctgcatctctttaaacagcgcgagctggcgaatcggcaccagttgcaggtcgctggaagcgcggaatggcgcccagcccaggcgttccagcaccgctttttcttccggcgttttgccgtagttcataaagaagtcgtagatcttgtctttggtggtttcggaaagattcttgcgccagacgatcggatcgcctgggatcagcgggctcttccagatcaccttcagttctttcagcttctctggcgcggaggttttcagcttgtcgaggttttcggtgttgttggtggcaacatccacctgcttgttggcgacggccagcgcgttggtttcatgcccggcgttgacggtgcgcttgaagtcgctggcggagatattgtttttggcgaagacgtagtagccggggacgaggaagccagaggtggagttaggatcgccattgccaaaggtgagatctttccgcttcgccagcagatcgttcaggttgttgatcggactgtctttgttgacgatcaacacgctccagtaacccgggcttccatccgccgcgaccgtctgggcgaagacctggccattggcgcgatccaccgcttccatcgcgctcagattgccgtaccaggcgatatccactttattgaagcgcatcccctggataatgcccgcgtagtccggggcaaagaaggcgttgaccttcacgcccagcttcttctccatatcctgcaagaacggcgtccattgcggtttcaggttttgctgactttccgtactaataatgccgaaattcaacgccttttcctgctcttcggcgtgcgccgggcttaacagggtgctgaggctgaacatgctggtgaaggccaggctggcaattatcttagcgttcattcgttttcctcaatgatggggatgtcaggcagctttcgcgttctcttcgacgcggttaatgctgcggtagagatggtcaaaacgttcgttatcaaactgttggctgctgccgtcgtagaagacgtgcccctggcgcagggcgacgatgcgttcgcagtagcgcagggcgtaatccacctgatgcagcgtgacgaccacggtgatgccgtcgttctggttgatgtcgcgcagggtgtccatcacgatgcgcgcactttctgggtccaggctggcgatgggttcatcggccagaatcactttcgcctgctgcatcagcgcacgggcaatcgccacacgttgctgctggccgccggagagggtggaaacgcgctgatgggcaaaatgcaccatgccaacgcgggtcagcgcctgtaacgcgcgctgtttctgctcgccggtgaaccagctaaaacaggtgcgccagaacggcgtgctgccgagcgcgccaatcagcacgttctccagtacgctcaggcggttcaccaggttgaattgttggaatatgtagccggtatgggcgcggcttttgcggatatcgcgggccaggcggccttcgcgctggactgtgcggcccagcagctcgatatggctaccgacagatttatcgccggtaatcaaaccgcttaagtgacgtaaaagggtggattttccggaaccgctcggcccaagcagagccaccatttcaccgtgatgaatgttcagatcaaccgcatgcagcgcctgatgctgattgaaggttttggcgagcttctcgacacggataatcgtttgcatgatgcagcctccctaaaaaagtggctccatcgtggcggattattgtgacgatttggttaattaaaagtgactaacagatgaagagttaacgggaattcgatgacagtgcgggagggcgggcctcccggcgggttattgcgttggttgttgtttgacgacattaatcatccacggtacgccaaatttatcggtgactttgccaaagccatgcgcccagaaagtttcctgccaggccatttcgatttttccgttagcggcaagattgtcaaaccagcgttttccttcttcgacctgttggctatcgagcaccagcgtaaagccggagtagctggcttttccactcggcatggcatcgctcatcatgatgtcgcttccggcaatgcgcacattggcgtgggcgatggcggtatcgggaaattgcattccggaagggcagttctcggcgctgtcctgcgcactttttggcatttcgccgaagctgattttatagagcagttccgcgcccaacgtacgttgataataggcaatcgcgtcggaacagttaccggcaaaagagaggtagggacttaacggcatgatggtgacctcagttaagagaagccagttaagtgtagttcgaaatttatacagatgagaggcggcctgataagacgcgcgagcgtcgcatcaggcagtcggcactgttgccggatgcggcgtaaacgccttatccggcctacggagggtgcgggaatttgtaggcctgataagacgcgcaagcgtcgcatcaggcagtcggcaccattgccggatgcggcgtaaacgccttatccggcctacggagggtgcgggaatttgtaggcctgataagacgcgcaagcgtcgcatcaggcagtcggcaccgttgccggatgcggcgtaaacgccttatccggcctacggatggtgcgggaatttgtaggcctgataagacgcgcaagcgtcgcatcaggcagttggcactgttgccggatgcggcgtaaacgccttatccggcctacggagggtgcgggaatttgtaggcctgataagacgcgcaagcgtcgcatcaggcagtcggcaccgttgccggatgcggcgtaaacgccttatccggcctacggagggtgcgggaatttgtaggcctgataagacgcgcaagcgtcgcatcaggcatctggcaccgttgccggatgcggcgcgagcgccttatccggcttaccgatcacaatacaatcagttctttttcacaaactcagatttcagtttcatcggaccaaaaccgtcgattttgcaatcgatgttatggtcgccttcaaccaggcggatgtttttcactttggtgccaattttcagcatgctagagctacctttcaccttcagatctttaatgatggtaacgctgtcgccgtcagccagcagattgccgttagcatctttaacgatcagctcgtcgctttcctgtgcaggttctgcgtcgttccattcgtaggcacattccgggcagatgtacatgccgttatcttcgtaggtgtattcggagttgcattttgggcagtgtggtaaactcatgtggatttcctcaaaagtcagcagggcaaaagcgccaaaaaacggcagattgccgaaaaaggccgcaattatacacaaaatccctgagtttgtcgggggtactgctgattttagacgacgatcgttttcatttgaaaggaaacgcaaaaagaaaataatctttttgcctctatttattatttaagataatgttaatgctctacttgttctttttttaattcacatgatatttttatctttctgacgttttaaacgtatcagaagacgttatttattctgataaaaaacaacacactaaatataaaattatttcttgcagtaattataaaagccgaaaacagaactcaaaaacaatctggctaaataaaataacaaaatttgctttaaggaagaattttctatgtacacacagaccctgtatgagttaagtcaggaggctgaacgcctgttacagctttctcgccaacagttgcagttactggaaaaaatgcctctctctgtacccggagacgacgcgccacaactggctttaccctggagtcagcctaatatcgccgaacgtcacgcgatgctgaataatgagttgcgtaaaatttcccgactggaaatggtgcttgcaattgtcggtaccatgaaagcagggaaaagtaccaccattaatgccattgttggtacggaggttctgcctaatcgtaatcgcccaatgactgcgctgccgacgcttattcgccatacgcccgggcaaaaggaaccggtactgcattttagtcatgtcgcgccaatcgattgtttaattcaacaattacaacagcgcctgcgtgattgcgatattaagcatctgaccgatgtgctggaaatagataaagatatgcgtgcgcttatgcagcggatcgaaaatggcgtcgctttcgaaaaatattatctgggtgcccagcctatttttcattgtctgaaaagtttgaatgatttagtgcgactggcgaaggcgctggacgtcgattttcctttttctgcttacgccgccattgagcatattcccgtgattgaagtggagtttgtccatctagcggggctggagagttatcccggtcagttgacgttactggatacccccgggccaaatgaagccgggcaaccgcatctgcaaaaaatgcttaaccagcagctggcacgcgccagcgcggtactggcggtgctggattatacgcaactgaaaagcatctccgatgaagaggtccgtgaggcgattttggcggtggggcaaagcgtgccgctgtacgtgctggtcaataagttcgatcaacaggatcgtaacagtgacgacgccgaccaggtgcgggcactgatttccgggacgctgatgaaaggctgtattacgccacagcagatatttccggtgagcagcatgtggggctacctggcgaatcgggcgcgctatgagttagccaacaacggtaagttaccaccgccagagcaacaacgctgggtggaagattttgcccatgccgcgcttggcaggcgctggcgtcatgccgatctggcggacctcgaacatattcgtcatgctgccgatcagttgtgggaagatagcctgttcgcccagccaattcaggcgttgcttcatgccgcttacgctaacgccagcttgtatgctctgcgatctgccgcgcataaactgttgaattacgcgcagcaggcgcgggaatacctggattttcgtgcgcacgggttaaacgtcgcttgtgaacaattgcggcaaaatatccaccagatcgaagaaagtttgcagctattgcaactcaatcaggcgcaggtgagcggcgagattaaacatgaaatcgagctggccctgacctccgccaaccactttctgcgtcaacagcaagatgcgctgaaggtgcagttagccgccttgtttcaggatgatagcgagccgttaagcgagattcgtacccgctgtgagacactgttacagacggcgcagaacaccatcagtcgcgactttacgctgcgttttgccgagcttgaatccaccctttgccgggtgttaaccgatgttattcgccccattgagcaacaagtcaaaatggaattgagcgagagtgggtttcgtcctgggtttcattttcctgtttttcacggcgtagttccccacttcaacactcgccagctgttcagtgaagtcattagccgccaggaagcaacggacgagcagagcacgcgtttaggcgttgtgcgtgagacttttagccgctggttgaatcagcccgactggggacggggaaatgagaaaagtccgacagaaacggttgattacagtgtgttgcaacgagcattaagcgcagaagtcgatctctattgccaacaaatggctaaagttctggcagagcaggtcgatgaatctgttacggcaggcatgaatacttttttcgctgagttcgctagttgtttgacggaattacagacgcgtttacgcgaaagtctggctctgcgtcaacaaaatgaaagcgtggtcaggctgatgcagcagcaattgcagcagactgtgatgactcacggctggatttacaccgacgcccagctgttacgcgatgatattcaaacacttttcacggcagaacgatattgaccaagacgttacttgacggccccggtcgcgtgctggagagcgtttatccccgctttttagtggatctggcgcagggtgatgatgcccgccttccacaagcccatcagcagcagtttcgtgaacgactgatgcaggaacttcttagccgtgtgcagcttcagacatggacgaacggcggcatgttaaatgcgccgcttagcctgcgtctgacattggtggaaaaactggcgagcatgctggatcccggtcatctggcactgacgcagatcgcgcagcatctggcgctgctgcaaaaaatggatcaccgccagcactctgctttcccggagctcccccagcaaattgccgccttgtatgagtggtttagtgcccgttgtcgctggaaggaaaaggcgttaacgcaacgaggcctactggtgcaggcaggtgatcagagcgagcaaatttttacccgctggcgtgctggggcgtataacgcctggagcttgcctgggcgctgttttatcgttctggaggagttgcgctggggggcatttggcgatgcctgccgtctgggaagcccgcaagcggtggcgttgttgctgggtgatttgctcgagaaagcgacacaacatctggcagagagtatcaatgcggcaccgaccacgcgtcactattaccatcagtggtttgcctctagcaccgttccgacgggcggggagcatgctgattttttaagttggctgggaaagtggaccacggcagataaacaacccgtttgctggagtgtgacccaacgctggcaaactgtcgcgctggggatgccacgactctgtagtgcgcagcgtctggcgggggcaatgctcgaggaaatcttctctgtaaatttggcgtaaataatcagttacatcaatgagtcctaaacgaaatccatgtgtgaagttgatcacaaatttaaacactggtagggtaaaaaggtcattaactgcccaattcaggcgtcaactggtttgattgtacattccttaaccggagggtgtaagcaaacccgctacgcttgttacagagattgcatcctgcaattcccgctccccttttgcggccgtcgcgctgatttttctggcgtttgcggaaatgggccaactctgcgaggaaagctatgctgaaaaggaaaaaagtaaaaccgattacccttcgtgatgtcaccattattgatgacggtaaactgcgtaaagccattaccgcagcaagtctgggtaatgcaatggaatggttcgattttggtgtttatggttttgttgcttacgcattaggtaaagtttttttcccgggggctgaccccagcgtgcagatggttgctgcacttgccactttctccgttccctttctgattcgaccgcttggcggactcttctttggtatgttgggcgataaatatggtcgccagaagatcctcgctatcactattgtgattatgagcatcagtacgttctgtattggcttaataccgtcctacgacacgattggtatttgggcaccgattctgctgttgatctgtaagatggcacaaggtttcagcgtcggcggtgaatataccggggcgagcatatttgttgcggaatactcccctgaccgtaaacgtggctttatgggcagctggctggacttcggttctattgccgggtttgtgctgggtgcgggcgtggtggtgttaattagcaccattgtcggcgaagcgaacttcctcgattggggctggcgtattccgttctttatcgctctgccgttagggattatcgggctttacctgcgccatgcgctggaagagactccggcgttccagcagcatgtcgataaactggaacagggcgaccgtgaaggtttgcaggatggcccgaaagtcagctttaaagagattgccactaaatactggcgcagcctgttgacatgtattggtctggtaattgccaccaacgtgacttactacatgttgctgacctatatgccgagttatttgagccataacctgcattactccgaagaccacggggtgctgattattatcgccattatgatcggtatgctgtttgtccagccggtgatgggcttgctgagtgaccgttttggccgtcgtccgtttgtgctacttggtagtgttgccctgtttgtgttggcgatcccggcgtttattctgattaacagtaacgtcatcggcctgatttttgccgggttactgatgctggcggtgatccttaactgctttacgggcgttatggcttctaccttgccagcgatgttcccgacgcatatccgttacagcgcgctggcggcggcatttaatattagcgtgctggttgccggtctgacgccaacgctggcggcctggctggtcgaaagcagccagaatctgatgatgcctgcctattacctgatggtagtggcggtggttggtttaatcaccggcgtaaccatgaaagagacggcaaatcgtccgttgaaaggtgcgacaccggcggcgagtgatatacaggaagcgaaggaaattctcgtcgagcattacgataatatcgagcagaaaatcgatgatattgaccacgagattgccgatttgcaggcgaaacgtacccgcctggtgcagcaacatccgcgaattgatgaataagctgaaacggatggcctgatgtgacgctgtcttatcaggccaattgaactcttaaggttcacttaatctctgacgcgcatactctcctccaggttaacggaggagagtgcaatgaaaaaccgtgtttatgaaagtttaactaccgtgttcagcgtgctggtggtcagcagctttctttatatctggtttgccacgtactgatctttcttcagccgtacccaggcccgcgtgccggaagtctcttgccggttttgcaggaaaaactgcccgtgatgcaactgtgtaatgcggctgacaatacttaaccccagaccaatcccgccataacggctgtccatacgtacaaacgctttactcaactccccgcatttactctcatcaatacctggtccttcatcttcaactgccatgaccgctccgtcatcttcttgcagcttaatcataatgttgctgccttgcgggctgtaacgatgggcgttttctaccaggtttcgcaataacatccgcagcagggttgcatcaccctgaacggtgatgtcggcggcgctctctggcaatagcagggtttgctgtcgctggtcgagcatggtactgagttcgtcatagctggggagaatgacatcttccagcagttttacatgttgataattaccggaagaaaaactctgtccggcacgcgccagttgcagcagctgggagacgctctccatcatctgatcaagccgtgccactaacggtgctacatcaatgtgatgcgttttcgccagcagttccagatgcaaacgcacccccgccagtggcgttcgcagttcgtgcgcgacgtcagcggtaaacaacctttcgttatccagcgtgctggtcaggcgactgaccagatcgtttaacgcgctaaccaccgcttcgatttcgagggtggcgctgtgaatggcaatgggcgttaagttgtcggcggtgcgcgcttccagctctttttgcagctccgccagcgggcgggtgatgcggcgtaccgcctgatagcagataaatagcgtcaggctgaccataaagacgccggggacaatcaggctggcgaccgcctcgcggatctcacgcatgatgtggcgatcgttgttgcgattgtcgcgtagcgcctgctcaaacagctgaatctgctcggtactttcatgccatagccagaagacgctgatcagctcaaacaccaacaaaatggccccgatggtcaatatcagccgttggcgcaggcttattggtcggcgcagaaaatgcatcagattcaattagttttcctcattcgcgaccagcatatagccaaagccgcgcacggtgcggatacgggctttgcccactttgtcgcgcagattgtggatatgcacttccagggtgttggtgctgggttcattgtcccagttatagatgtcgttgtagagaatttcccgatgcaccggactgcctgctttgagcattaaccgactcagcagagcatattctttgggcgtcagaatcaactcttcaccgcccatccatacctgacggcgacccatgttcagcgtcagattgccaacaatcagctcactttcgccctgattattatggcgtcgtagcagggcgcggatacgggcatgtaactcttccagcgcaaaaggcttcaccagatagtcgtcggcaccgacatccagcccggcgattttgtcggtcagcgtatcgcgagcggtgaggatcagtaccggcagggtatattttttctgccggatacgggcgagaaaatgcagtccatcttcgtcgggtaaccctaaatccagtaccaccaggctgtaatgacctgcctcaaggctttgttccgccatccgcgcggttgtcacgctatcgcacgcgtagccttcggtttgcgccgccagaatcagtccctgcaataacagcgtatcgtcttcaacaatcagaattttcattcactcactctcctgcaagtttgcagaatatcatccgcagcctggtaatacttcgtctcaacgccagttaatcccaatagcgtggagaataaattgtcttgactatagtgttgcgtttgcgcctgtttttgcaggcagttctggtcaacctgataccgtttttgataatcctcgctcagccacagcagcatcggcacctgtttttggctatccggggcgatggcataaggcagaccgtgcagatagatgccattttcacctaagctttcaccgtggtcagaaagataaaccaggctggtggtaaatttatcctgatgttctttcagcagattaatcgctttatcaacaatatagtcgacgtaaaccagcgtgttgtcgtaagtgttcaccagttgctctttggtacaggtctggatctcattggtgtcgcaggttggggtaaatttcctgaactgaggcggatagcggttgtaataggtcggaccgtggctgccgatggtgtgtaagacaatcacgccatcaccttgcaggttattgatgtactcttcaagcccgtggaacagcacttcgtcatagcattcgccgttgatgcactgatcaggtagattcagcgcggtgacgttctggtgaggcacgcggtcgcaggcacctttacagccgccatcgttgtcattccacagcacgttgatgcccgctcgctgaatgatatccagcacgccttcctggtgctgtgccagctcttctttgtagtgctcacgcggcatatcgctgaacatgcacggtacactaactgccgttgccgtgccgcaagatgcggtattagggaaatagaccacgttatctttcgccagccgcgggttagtttcacgcgggtagccgttgagggagaagttctccgcccggctggtttcgccgacaatcaggatggtcaaatttttacgtttttcgttctgcattaacgggttgcggtgcgcgtcttcaccaattcgcaccagcggcagatttgccagtcgctgatgggagtaccaactccagctggcaacaatgctgttagaggggcttaaggatttcaccagctctttgttattgcggaacaagctggcgtagtctttataaaacagtgcggcgaccagcaaaatcagtagtacagaaaccagaatattggctccacggaaaagaacactgcgcagacggctggtggcaggtttgatttttatccagcaggcaatcagcgcagcaagcacgccgctgaatcccagcgttaataacatttgcggtgtcatcagcgcataactttctgccggagtggtatcaataatattggcaatcatgctgcggtcgatgacgatgccgtaagtcattatgaaatattgtgcagccgcgccaaccagaataaacaggcaggccagtggtcgattaagccataagaaagagcttagtgtcaggacaatattaatcacgctgaaagcgacgaccggcatgctcaagaaaaccagtacgttatgcaggctatccagcggcagcgcctgcaacacctgtttaaaaaaggcaatattcaggcagatagagatataaaaagcggccaacaatagccaggcgagtaaattcaaagagggtctttttagtaggcgcttcaacatcacggtgtttccatcgaacaaagtgcgcatatgctcgcaaagcaaaattaagccaaccttaagttcttaaggttggcttttatgtttgctggattaaggggaattaatctttgcttattggtgcatctaagggatacgggtttttatgtagccggttgtaattcagcgcatacatggcggtgatgaccatcagggtgacaaaactccacataacctctttcgctccggaccccaccacggcccagatgcagtagaggaaggcaatggtagtaactgccagatatgccgggcgtgctttaccaaagtgaccgtgtccgagcagcagtaacgccgcacaggtgtaaagatatggcaccagtgtaaagatgacgctgacggaagaaaccagaccgaactctttggtcgcgtttggactaatgctgctgagctggaagatggtcatcaaaataccgacgataatcagccccgccactggcgtacccgctttatttacacgggcaaaaatcggtgggaacagtccgtcatcggcagcggctttcgccgtttgacccgccagcaacgtccagccgcccagactacctaagcaacccgcagctgcgcagaaggaaacaatggccccggcggtgtcacccaacgccatccgtgcggcatcaccgaatgggctagcagaaacgcgcagtgcggcattagggatcatccccataatcgcggtggtagaaagtacatagcaaacggcggcaatcaataccccaccaatggtggcgatagggacattgcgtttcgggtttttcaccacacctgcggcaacggaggcactttccacaccgatgaagctccacagcgtaacgttaagggtactttgaattgcaccgaaggtgcccaggccgctgacgttccatgccgccatataggtttcaccacggaaccagaaccagccaaatacggcaatcccgacgatggggatcagcgccagcacggtggcaactgcctgcacacgggtgatcattttcggaccgacaatgttcagcaggacgaagatccacagcaccacgacgcaggtgatggttaataccaatggatctttcagaatcgggaagaagtaacttaaatatcctacgccaatgaccaccatggcgatattgccgatccagcaggccagccagtagaggacgttggtttgataaccgagaaacgggccaaagcagcggcgggcgtaagcgtaagaaccaccaggacttgggtcgaggaagctcattttggcgtataccatgctgagccccagtgcaccgataatcgtcaccaaccatccataaatggcaatcccgccagtagaggccaggtttgcaggtaacagaaaaacaccactccccataatattcccgctcaccatcagggtgacggggattaagcccactttgtgagcatcagcatcgctagacataattaaactcctgcgaaggcgagcttcgtgacaataaattacgtcatatcatacgcctgcattcgatagttgaattattatcgaccgggttatcgctgatgccgttattaatatagctcttcgttaaggttaaaaatcaggcgacagtgcgttctctgtgctgactaacataatgcagcggcgtcataccgtagaagtctttaaagacagaaataaagtagctcgtactgttgtagccgcaggactgacttacctgagagatatttttaccgtccatcattaattcatttacggcataacgcatgcggcaggtggtgattatttggctataactggtgttttcgcttttcaactttttctttaacagacttgggctaagacataaacaactggctaccatactaagattccagtctttgtgaatatcgctttcaataatttgataaacgctgtcacttacacaattacgtaacatatacatcattaaactaacgaattttttactgtcgagaaaacgggatagcaccgtgaataataatgcgcgtgttcgttccttttcactctcagtttctgcgggcatcatgctgtgttgcgcggcaacgcgaaagacgtctggcgtcaggcatggcagggtgagtatgggcgtagcgctacgttgccatactggtatttggctgagatctttattcagaaaccggaggtaatctttgatgatgtcgtgactaatatgagcaaccaaagtgttgttaagagaggagacgtcgataatattattttcacaatttaataacgccatatggttagctttaaggctaataggttctttcccattcacccttatccagacatctttttcagtcaataaaacaatacaaggttggtcgctgcaaatcctcatacatgtactcctgagtgcgaataaaagaccagttctcgctaaagcaaagcgataccgggaaatggttatataattgtatgatgaatataaacatgcataaaaataacgagttttactaatagtacaaatttttatagtaatttctcatgtacatatttttttacaggataaataacaggcaaaaaaaagcgcggggtggggccgcgcaaaaagtatgacatttttgtttgcagcaatttttatgaaaacgttgccatactcaaaaggcctaaggccaggcggcgtaatgttatttaaacaattacgccttcagcggaatagtggttacgctttcacgcacataacgtggtaaataccgtcaataatttcagtcccttcagtttcgtgttcaaatccagggaaatggtggtcccaggattgcaggctgcgtaaataacttacttgcggactgtttttatcgccgaagttttcaccagacagcagcatcgggattcctggcggatacgggataacactgtttgccgcgatgcgtcctggcagattttcaatggataccagttcgacattgttgtcgacaatcgcgttgtacgcttcacgcggggtgacttccgccaccggcaggccggaataggcttcgttcaaccgtgcgccagggttgttttctttcagccaggcaaacatggtgtcacccagatcgtgaatccccatgttcgcgtaagtgtcaggatattgttcaacaagttccggcatcacctgcgccagcggtgtgttggcgtcatagtggcgtttgaaggagcaaagggtgttaaccagagttccccatttcccacgggttacgcccatagagaacaggaacataatttggaagtcagtggtgcgggtaggtacaatgccgtggcgaccaagccaggcagtgaccagcgccgccggaacaccggtttcttccagttcaccatcttcacccattcccggagcaaggatgctgactttaatcgggtcgagcatactccagttatccggaatatctttgaagccgtgccagctttcgcccggatgcattacccagcagtcctgaacggtggtcagcagtttggttggtgcgtcagcaaagtcataggttttgccggtttgtgggtcggtgacgacttctttgttccacggtttgaagaaccagctaccgtcagcggtgaactctttatatagccgcgccatcgcctgacggaaatcaaccgcttcgtcaatcacttcctgtgtcagactcaggccgctgttgccgtccatcatgctcaccgccacgtcgttggatgcgcagatggcatacagcggggaggtggtggcatgcatcatgtaggcctggttgaagcgggagaagttaatcgccccacgaccttcacgtacatgaatataagaagcctgactcagcgcattcagcagtttgtgggtggagtgggtggcgaaaacggtaggaccgttgtgatcgccaggttcgccgcgcatggcatagtgatcggcatagatcgggttgaaacgtgcatagccgtaccaggcttcgtcaaagtgcagacgatcggaggttttttccagcagatcctgcgcttctttagcgttataacacacgccgtcataggtgcagttggtcaccacgcagtaagacggtttttgcccggctttgtctttggtcagcgggctttcactgattttcttctgcaaggtttcaggttgcatttcctgcggatagattggcccgataatgccgtagcggttgcggcttggcaccatatagaccggtttcgcgcctgtcagcatcaaaccttgttcgatggatttatggcagttacggtcaacgaccacgacatcgttatcggtcatgcaagcctgcatgatggtgcggttagagccggaagtaccgacgactacgctccaggagcgatcggcaccaaatacgcgtgcggcatatttttcgctttcgccaaatgcgccagtatggtcaagcaaagaaccgagggaagttcgttcgatgcccatgtcggtgcggaacagattttcaccatagtagtcatggtagaaacgtccggcgggtgttttggtaaaaccaacgccgccctggtggcctggcgctgcccaggaatattcatggatgtcactatatttcatcagcgcgctgaacagtggcggcaacagctgctggcggtagcgggtcatcgcggcaacggcgcgtccggcgataaagtcggcggtatcttccagaatccaggcgaattcatcgacaagctccagcaggtcgcgatccattgcggcgagggctttttcccgatcgcccaacaggaagaccggcacgttttgttggcgctcatgaagcttaccgatcaattgtctgacgttttgatgttcgtccggatgttccatttgatagctgaacatcaggcagtcaatggcttcgttactagagagaatggcaaaaccatcatcaaaggaggtggatttaatcacggtaacattttgctggcttaaagcatctgccagacgctcaacggcgttaccgacccaggtgtcttgatggagaaactcgctttcaacaattaatactttcatcattgcttacccggttatgaaggaatcttcgttgcgggcaagtatcttccggccttttcgggctgtaaagcgcgtgaaaaacaaacatttttgaaatatttagttttataaacaatacgttatgtgattattttaaattattttcactgcttattatcgacggctaaactatttttttggctgatactgatatcgtctttagccgggaaacgtctggcggcgctgttggctaagtttgcggtattgttgcgggctcatgccgacatatttgccgaacgtgctgtaaaaacgactactactacgaaagcctgccgtcagggcaatatcgagaatacttttatcggtatcgctcagtaacgcgcgaacgtggttgatgcgcatcgcggtaatgtactgtttcatcgtcaattgcatgacccgctggaatatccccattgcatagttggcgttaagtttgacgtgctcagccacatcgttgatggtcagcgcctgatcatagttttcggcaataaagcccagcatctggctaacataaaattgcgcatggcggctgacgctgtttttgtgtgtgcggctggttttattgaccagaatcggttcccagccagagaggctaaatcgcttgagcatcaggccaatttcatcaatggcgagctggcgaatttgctcgttcggactgtttaattcctgctgccagcggcgcacttcaaacgggctaagttgctgtgtggccagacttttgatcaccatgccgtgagtgacgtggttaatcaggtctttatccagcggccaggagagaaacagatgcatcggcagattaaaaatcgccatgctctgacaggttccggtatctgttagttggtgcggtgtacaggcccagaacagcgtgatatgaccctgattgatattcactttttcattgttgatcaggtattccacatcgccatcgaaaggcacattcacttcgacctgaccatgccagtggctggtgggcatgatatgcggtgcgcgaaactcaatctccatccgctggtattcgctatacaggctcagcgggctgcgggtctgtttttcgtcgctgctgcacataaacgtatctgtattcatggatggctctctttcctggaatatcagaattatggcaggagtgagggaggatgactgcgagtgggagcacggttttcaccctcttcccagaggggcgaggggactctccgagtatcatgaggccgaaaactctgcttttcaggtaatttattcccataaactcagatttactgctgcttcacgcaggatctgagtttatgggaatgctcaacctggaagccggaggttttctgcagattcgcctgccatgatgaagttattcaagcaagccaggagatctgcatgatgtctgcacccaaaattacatttatcggcgctggtagcacgattttcgttaaaaatattcttggtgatgtgttccatcgcgaggcgctgaaaacggcgcatattgccctgatggacattgaccccacccgcctggaagagagccatattgtggtgcgtaagctgatggatagtgcaggggccagcggcaaaatcacctgccacacccaacagaaagaagccttagaggatgccgattttgtcgtggtggcatttcagattggcggttatgaaccttgcacggtgactgatttcgaggtctgtaagcggcatggtctggaacaaaccattgccgatacgttggggccgggcggtattatgcgcgcgctacgtaccattccgcatctgtggcaaatttgcgaggacatgacggaagtctgccccgatgccaccatgctcaactatgttaacccaatggcgatgaatacctgggcgatgtatgcccgctatccgcatatcaaacaggtcgggctgtgccatagcgtgcagggaacggcggaagagttggcgcgtgacctcaatatcgacccagctacgctgcgttaccgttgcgcaggtatcaaccatatggcgttttacctggagctggagcgcaaaaccgccgacggcagttatgtgaatctctacccggaactgctggcggcttatgaagcagggcaggcaccgaagccgaatattcatggcaatactcgctgccagaatattgtgcgctacgaaatgttcaaaaagctgggctatttcgtcacggaaagcagtgaacattttgctgagtacacaccgtggtttattaagccaggtcgtgaggatttgattgagcgttataaagtaccgctggatgagtacccgaaacgctgcgtcgagcagctggcgaactggcataaagagctggaggagtataaaaaagcctcccggattgatattaaaccgagtcgggaatatgccagcacaatcatgaacgctatctggactggcgagccgagtgtgatttacggcaacgtccgtaacgatggtttgattgataacctgccacaaggatgttgcgtggaagtagcctgtctggttgatgctaatggcattcagccgaccaaagtcggtacgctacctagccatctggccgccctgatgcaaaccaacatcaacgtacagacgctgctgaccgaagctattcttacggaaaatcgcgaccgtgtttaccacgccgcgatgatggacccgcatactgccgccgtgctgggcattgacgaaatatatgctcttgttgacgacctgattgccgcccacggcgactggctgccaggctggttgcaccgttaaaacgcgactaaacgctactgcgccgggggatttattccggcgcacacctctgacgataccaataacagaaggcgggcgttggtaacagcgacccgataccctatgagcatttcaatgactacaaaactcagttatggatttggagcgttcgggaaggattttgcgatcggcattgtgtatatgtacctcatgtattactacaccgatgtcgtcgggctgtctgtgggtttggtcggtactttgtttctggtggcgaggatctgggatgctattaacgatccgattatgggatggattgtaaatgctacgcgaagccgatggggtaagttcaaaccctggatcctgatcggtacgttggcaaactctgtaatcttatttctcctctttagtgcgcatctgtttgaaggtactactcagattgtctttgtttgcgtgacctacatcctctggggcatgacttacaccattatggatattcccttctggagcctggttccaaccatcacgctcgataaacgtgagcgcgaacaactggttccttatccgcgtttttttgccagtctggcaggctttgttacggcaggtgtgacgctaccatttgttaattatgtcggcggtggcgatcggggatttggctttcagatgttcactctggtactgatcgccttttttattgttagtaccatcatcactctgcgcaatgtgcatgaagtctttagcagtgacaatcaaccgtctgctgaaggaagccatctgacacttaaagccatcgttgcgctaatttataaaaacgatcagcttagttgcctcttgggtatggctcttgcttataatgtagccagcaacattattaccggctttgctatctattatttcagttatgttatcggtgatgcggatttgttcccctattatctgagctatgcgggagctgctaacctggtgacgttagtattcttcccacgcttagttaaaagtttatcccgacgcattttatgggccggagcatctattcttccggtgttaagctgtggtgttctcctgttaatggcattaatgagctatcacaacgtcgtcctcattgtgattgcgggtattttgctgaatgtgggaacggcgcttttctgggtattacaggtcatcatggtggcagatatcgttgattacggtgaatataaactgcacgtacgctgtgaaagtatcgcttactccgtgcagactatggtggtgaagggcggtagtgcctttgcggcttttttcattgcggttgtgttagggatgattggctatgtaccgaatgttgaacagtctacgcaagccctattaggtatgcagtttattatgattgctctaccaactctgtttttcatggtaacgctgattctctacttccgtttctatcgcctcaatggtgacacgctgcgcaggatccagatccatctgctggataaatatcgcaaagtaccgcccgagcctgttcatgctgatattccggtcggtgcagtgagtgatgtgaaagcctgacgtggacaatagctaacgaaaatggcctgatgcgatatgtttatcaggccacgtcttaatgtaatgctttggatttgcaaattttgtagaccggataaggaattcacgccgcatccggcatcaacaaagcgcaagttgttatccggttatcaagccaaagcgccgtagctggcggcaatgaaagcgagcgaggaatatcaccgtcgttaatgcgccaagcagcgcgcagaacatatcggattgcgtgtcccactggtcgccctgggtgccgagaaaatcatccgctccctgacccattgccagcgctgcccaccactcgattaattcatacatcgcgcttatcgccagcgccacgcagcagaccaggaacgccaccattttacgtccgcgcacgtacatcccgcgaacgagaatttctcgtgccaccagtgcaggcaccagcccctggaaaaagtgccccagcttgtcatacggattacgactcaaccccagccattcctgcacctcaaaaccaacggggactttcgcgtaggtgtattgtccgccgaccatcaggatgatggcgtgaaggaaaatgagcgtatagagcagcggcgttaacggataacgtctggcggtggcaagcagtagctgcacgacaataatcaccggtgtcacttccatcagccaggtgagtttgtcatgggcgctaatgccggtataaatcaggattaacgttagcgtcagtgcgctggtgttaagaattaacggcttgagtgtgcgggtcatggtgagttcgcaaatcagggaaaatactgactattcaccagcaagcgtgaaattacaatcgcaaaagaggtggccagggggatcacctggcagcatgctgccaggcgctgggccgaagaggttacttagtgcagttcgcgcactgtttgttgacgatttgctggaagaagtcgttacctttgtcatcgaccaggataaacgccgggaaatcttctacttcgattttccagatagcttccatacccagctccggataagcgacgcactccagatgcttgatgctctgctgcgccagtaccgccgccggaccgccgatgctaccgaggtagaagccgccgtgtttatgacacgcgtcggtaacctgctgactgcggttacctttcgccagcatgatcatgctgccgccgtgggattgcagcagatccacgtaggagtccatacggcctgcggtggttgggccaagactaccacttggataaccggcaggggttttcgccggacccgcgtagtagatcgggtgatctttgatgtactgcggaagttctttaccggcgtcaatcagctctttcagcttggcgtgtgcaatatctcggcccacgataatggtgccggtgaggctcaaacgagtggataccgggtattggctaagctgggcgaggatctctttcatcgggcggttaaggtcaactttcaccgcttcgccttcaccggcctggcgcagttcttgtggaatgtactggcctgggttgtgttccagtttttcgatccagataccttcgcggttgattttcgctttaatgttacggtcagcggagcaggagacgcccatgccgaccgggcaggatgcgccgtgacgtggcagacggataacgcgaatgtcgtgcgcgaagtatttaccgccaaactgcgcgccaagaccgagtttctgggcctcttccagcagttcctgttccagctggacatcgcggaacgcctgaccatgttcgttcccttccgtcggcagttcatcgtaatagtgagcgcttgctaacttgacggttttcaggttggtttccgcagacgtaccgccaatcacaaacgcgatatggtacggcgggcaggctgcagtaccgagggtacgcattttctcgacgaggaagtttttcagtttgccgggagtcagcagggctttggtttcctggtagagatacgttttgttggcagagccgccgcctttcgcaacgcaaaggaatttgtactcatcgccatctaccgcgtacaggtcgatttgcgcaggcaggttagtgccggtgttgacctctttgtacatgtccagcgccgcattctgactatagcgcaggttatcttcgatataggtgttatagacgcctttgctcagcgtttcttcatcaccgccgccggtccacacgcgctggccttttttaccgacgatgatcgcggtgccggtatcctggcaggtcggcagcacgcctttggcggcgatttcggagtttcttaagaattgcagcgccacgtacttgtcgttttcgctggcttctggatcgtgaagaatagccgcaacctgtttctggtgtgccgggcggagcataaaagaagcgtcgtgaaaggcttgctgcgccagcagggtcagggcttctggttccactttcaggatggtttcgccgtcgaagtcggcaacgctaacgtaatcggaagtgagtagatagtattcggtattgtctttccccatcgggaaaggtgcctggtagataaagggtttgttactcatagcttccagcctgtaactctgtatttgttattcgaaaatggcgtgccgcgtagtcacgggcggcacgcaaagtgcatttataagaacccgtacatcgcggcgaagatccagccgaagacgcagcttacgctcacaccaatcaaccccggcagaataaagctgtggttgatgacgaagcgaccgatgtgggtggtgccggaacggtcaaactgaatcgctgccagatcgctcggataagtcggcaggatgtaataaccgtagcaagccggtgcactagccacgatgtatgccggatcaacgccgatcgccagcgcgaccggaacaatcgccgccagcgccgcagcctgagagtttacaaacttggaaaccagcagcagaacaatggcataggcccacggatactctttcaccatttcacccagtacgccctgaatttcagacatatgcgcaccgaacatggtttctgccatccatgcgataccgtacaccgccacgatggcgatcataccggaacggaagacttcgtttttactgatagacgcgggattggttttggtcaggataataatcagcgccccggtcagcagcataaacatctgaataaccagtaccatgctcagcggtttgccgccgaaggatggacgcaggtcgctatcagcaccaagaagggcgactacagcgattgccccgaggaaaatccacattgccagccagttgcttttcggcagttttttatccagcagcgtcgcggtatcaccgtaaacatactcacggttttccggtacggagatgaatttctggaactcttcgtctttatccagatctttaccgcggaaccagctgaagataccgatcgccaggataccgattaacgtgcttggaatggtgattgccagcagatcgaggaactcaagatggcgaccatcaaaggtgacattacccagcatcgcaaccagagacacgaccgcaacgctcaccggactggcgataatccccatctgtgcaccgatagaacttgccgccatcggacgttccggacggatgttgttcttaatggcgacgtcgtagatgatcggcagaatggtgtaaaccacatgacccgtaccgcaaagaatggtcagtgtacaggtcacaaacggcgcgacaatactgacatatttcgggttgcggcgcagcagcttctcggcaatttgcagcatgacatcaagaccgccgctagcttgcaaggtcgcgcttgccgccaccaccgcaatgataaccagcatgacatcaactggtggtttacctggctgaaggtggaagacgaagaccagaatgaccagaccgataccgcctaataaacccagcgcgataccaccctttctggcaccataaaacagacatatcagtattatgataagttggatagtaaataacatgtgtgaaccctcgcgataatcctatttaaatttttgctgaatagatcacagtcacgttctgttttgtatgaactgttttcagagcctgactaaatatccgtttggtcgttaccggctttagcaaatacctcacagtgaatattggctgattaaagcagcggcaaatttatgcactgtgataagcggctttttcagagagaaagactctctggcgatgggtttatagtttgtactgcgcagatgttaatgttttgtttgctgttatcttattgatatttatcggtctattttttgttctcagggcagatgtcattaggtttatagattaatctgatctacccatttgtgggtaaaaatacacataatgcgggtgacataatagttaattaacttttgttagcgttttgaaattaaaaacaccgttcacctgaagagatattaatttttagcgatgatggagggataattatatttgatctggcacaagttttactgatgaaggatgtaacttgtgccaggggtattttgcattacggtaataattattacttacagataaccagcgatccgttattggcaatattgtttcagtagactgtagtgttctgcctgaatacggtaacggtaaactggacgccccgtgacgccataatggatactggtgaacaagatgtggcagttgaccagccagatgaggtatttacggcaggaaacacggctaatgttaacctcgttggctagctcgtcggtactaaattcatagtcctgatgcgcgtcaatccactggcacagtgtgcgtaacgtctgcggcgttaagccttttggcaagcgacgaggatcctgttcgttggagctgctgccgtggattagctgatcaagctcggcctggtcataatactgatgtttttccagcgccattttcttttgccgccagccggtgagcgcctcttcaaagcgggaagcctggaagggtttgatcaggtaatccacgacaccgtaatgcaggctatctttaatggttgccgcatcggctgcggaggagatgacaatcacatcacttttgcaacgcgcgttatgcaggacaggcagtaaatcgagcccgttctctttttgcatatagatatcgagcaatatcaggtcgataggcgtatcgctattgaagataatctctttggctttctccagcgtgctggctgttccacagcattgaaagcctgggatttgtgctacgtatcggcgattcagctccgcgaccattgcgtcgtcatcgataattaatacattgatcatctgttgctcctctccccgtcccagggtatctggacaaaaaattgtgtgaaaatcccgggttcgctttccacggcgatgctgccgccgagattttctacctgttgtttgacaagtgctaaaccgacgcctcgctcgcttccttttgtgctgacacctttgtcaaaaatgtgatcgattttatcgggtgcgatccccggtccatcatcattaacttcacagtgcagccagccgtgacggtagtgcaatgttacgctaatttcgcctccgggttccggccctaatgcctccagcgcgttttctatcagatttcccaacgtggtaatcagcgtcgcgacctggtcctcactgccgctgtctggcagctggctttcactgtttaaaatcagcgtatggcctaaatcggtcgcgcggttaatcttgctgattaaaaaaccagcgataaccggagatttgatcttacccagcagagagccaatctcttcctgatagttattggctgttttgagaatgtaatcttccaactgcttataactcttcagatgcaataatccgagaatcacatgcaatttattcataaattcgtgggatcgttcacgaagtgcgtcagcatagttgaccagaccgtcgagtcgctgcatcagtttacgtacttcagttttgtccctgaaggtactaatggcaccgatgataacgccattactgcgcaccggaacggtgttgatcagtaatagccggtctttaatcgtaatctcttcgtcgcggcgcggggtaccgtcgcgtaacacttcgctgacatctaccacctgactccaactgtggcttagcgtgctcagtttctcatcgtcctggctcttacggtaattcagcaattcttgtgcggcatcgttgatcagcgtgacctcgccgcgatcgtccacggcaacgacgccttctttgatagactgcaacatggcctggcgttgctcaaacagcgtggagatttcgtagggttccaggccgaaaaggatttttttcagtaccttaaccagaatgcaggtgccaatcagtccgaccagcatgccaaataatacgctccagataatgctccagcgactgtcattgatctgttgggtcacacggcttaactcaaggccgatcgccaccacgccaatttgtttatgattttcatcgtagatgggggtaaatacgcgtaaagcctgcgccagaaaaccgcgattgatagcgacattttcttcgccattcagcgctttaaggatgtcatcacctttaaatggctgaccaatacgctgggcttcaggatggctgtagcgaagactttgcatatcggtaacgacaataaacagcagatcgttgcgtttgcgtacggcttccgcgatggcctggatgccactctcctgcggttttttctgcaagccctgacggatttccgggctgtcggcgagggtacgcgccactgccagtgccttgttggctagcccatctcgcgtcatatcactgatttggctgaagtaaatcagatgcaccaccaatagcacgctgaacagtaccgcactgaccattaagatcactgtggtactcaatttcatcggacgtttgcgtaacatgcggtagggcaaactatgtctcatcagcttccttgtgtgacaaatttcttaagcattatctctgatgaggcgggtaattcaaagggagtaagaatgattggctatataggggaagagactctggcaacggaaactgccagtgctgtatgaagattccggggctatgcttatagcgataatcatactgatgagagagggaaggtcatggatcaggcgctactggacgggggttatcgctgttataccggcgaaaagatcgatgtctatttcaacactgcgatatgtcagcattctggcaattgcgtacgtggcaacggcaagttatttaatctcaaacgaaagccgtggatcatgccggatgaagtcgacgtcgccactgtggttaaagtgattgatacgtgcccgagcggcgcgctgaaataccgtcataaataagcgagggtaaaatggaaatacgcgaaggccacaataaattttacattaatgacaaacaaggcaagcaaatcgctgaaattgtctttgtgccgaccggagagaatttagcgattatcgaacataccgatgtcgatgaaagcctgaaagggcaagggattggtaaacagctggttgcgaaagtcgtggaaaaaatgcgtcgggaaaaacgaaaaattatcccattatgcccatttgcgaaacatgaatttgataaaacgcgggagtatgatgatattcgcagttgatgggagagtacagagtcacgatatttttcattctctccgcgatgtgatgcaggagagcatctgaagggtagggggatgcacaaagaatgggcagagagcgcgtttttttgtcccaagtcatcccctttactgagcaaaaaaaagaatatctcctatatgagaatcatcaatcggggttaataagttttgcgtccccagagcgtttaatattgataggagtcatattatggaaggtaaaaacaagttcaatacttatgttgtttcttttgattatccaagttcttattccagtgtgttcttaagattaagaagtttgatgtatgatatgaatttctcctctatcgtggctgatgaatatgggataccacgacaattgaatgaaaactccttcgcaataacgacaagcttagccgcaagtgaaatcgaagatttaatcaggctcaaatgcttagacttaccggatattgattttgacctcaacattatgacagttgatgactatttccgtcagttttacaagtaaccaggaaggataagaagaacataaaaaatggcactattctctaaaatattaattttttatgtgattggtgtgaacatatcctttgtcattatctggtttatcagtcatgagaaaacacatattcgtttacttagtgcattcctggtcggaataacctggccaatgagtctgcctgtggcattacttttttctctcttttaagagctgtagttgagtggacccgctggttatcgtgaaacgaagcgtctctcctcaaaactggatttgcggaacgatgaacgaagcagtcgcctgactgcttcgttcattaaagtgaaatttatttctgtgggcgcatcgccgggaagagaataacgtcgcgaatagtatggctgttagtaaacagcataatcattcggtcgataccaatacccagaccagcggttggcggcagaccatattccagcgcagtcacgtaatcttcgtcatagaacatggcttcgtcgtcacctgcagctttagcattaacctgttcctggaaacgttcagcctgatcttctgcgtcgtttaattcgctaaaaccattaccgatttcacgaccaccgatgaagaattcaaaacggtcggtgatttccgggttaacatcattacggcgtgccagcggggacacttctgccggatattccgtaataaaggttggctgaatcagatgtgcttctgccacttcatcaaagatctctgtgacaatacgtcccaacccccagcttttctctaccgtaataccgatagattcagctaatgctttagcagcatcaaaattatccaggtcggccatatcggtttctggacgatattttttgattgcttcgcgcatggtgagtttttcaaacggtttgccgaaatcaaacacatgctcgccataagtgactttagtggtacccagaacctcttgtgccagggtgcggaacagactctctgtcagttcaatcaaatcgtggtaatccgcatacgccatgtagagttccatcattgtgaactcaggattatggcgaacagaaataccttcattacggaagttacggttgatttcgaatacccgttcaaaaccgcctacaaccagacgtttcagatacagctccggcgcgatacgcagatacatatctaaatccagagcattatgatgggtaataaacgggcgagcagatgccccacctggaattacctgcatcatcggggtttctacttccataaagccgcgcgcgaccatgaattgacggatagcggccagaattttactacggacaacaaacgtttgacgggatttatcgttagcgatgaggtccagataacgttgacgataacggacttcctgatcctgcagaccatggaatttatctggtaaaggacgtagtgctttagtcagcaggcgcagctcagtacagtgaatggaaagctcacccgtttgcgtcttaaacagcgtaccgcgggcaccgataatgtcacccagatcccattttttaaactgatcgttataaacaccttctggcaggctatctcttgcaacgtacagttgaatacggccaccgacatcctgcaacgttacaaaggaggctttccccatgatacgacgggtcatcattcggccagcaacgctgacttcaatgtttaaggattccagttcctggttatccttcgcatcaaactcttcgtgcaactggtcagaggtatggtcgcggcgaaaatcattgggaaacgccacaccttgctgacgtagtgccgccagtttttcgcggcgatttctcagttcatcgttaaaatcaatagcctcattggctccccgtgtttcttgttcagacattttggttcctctaaatccagctttcaatttagcgtagataaagagacagatcggtacactgtattatctgcctcgactattagtaactcagtttatcttatcgaaactaacgcttacctcaagttgatatcactaataaataaccatcaaaatggtttaaatgacttattaatctcgatttgttagtgttataaactaaaagttaatttattcataaccaattgtttttacgacagttaatcgttgctctcctgtatcatattcgtcggcgtgctaaacagaaaacgggtagcaaaggccaatacgacgatgatcgcgacacaagccaacgtccactctcccatctgagaaaagaatcgctggtaagctgcaattgccataccgctaatttggctctctgtcgtctgctgtgccacgacgcctgccagccagttggcgaccgcgcctgttgccagcatataaatcccggttaatacgccagacattttcagacgcgtgatttgcgcaatcgccaccgggtcaataaagagttcggcaaagcccattagcgccagcccggatatcatcacgcccatactcgcttgaccgtcagccgctgcatgtcgggcatcaaatgccaacaacataaagccacaagccatcagcagtaagccaaaggcaaacttcagccagacgcgcaatgtactgttgccgcggctttctgggctcgccagccaggccagtacaaccccagcgagcatcaccgcaattgcattcacgctctggaatagtgctgtaggtacttcaatattgaatgcctgacgattcacaaagcgatcgataaacaagctgatggtactgccgccctgttgtgccagtacccagaacaatgtcccgacaaacatcaacaatacaatttgccaaagagcacggcgatgttcggggaatttgatcatcatgcgggcaatgatttgtgcggcaatgaggcaaacgatcgccagcaaatatccggaccagtcgttctccagcagcagagtaaaaaatactggggctaaacagagcatcaccactaaccagctccatactggtaaggcaaatttgacactagtgagcgcttttttatccatactacgtgtggactggaaatgacgatgaccgcttaagaaaatcaacaaaccgataaacatgccgccacccgcaagggcaaagccaacatgccatccataccactgagcagccaggccgcaggcgattggggctgcgatagaaccgatattgcccgcagcatacagcaggctaaaaccgccatcacgtcgatgatcgttctcgtcgtagagctcgccaagcaaacagctgatgttacttttgaataaaccgtagccacaaataatgattgccagcgccagatacaggctaaaggtactatttgtatcaatacccagcaccacatggccaagggtcattaacagcgcgccggcaatcactgcagtgcggttgccgagcaggcggtcggcaagccagccgccgagaataggggtaacgtaaaccagagaagcatatgcgctgaacaggctgatggcatggttatcatcaaaaccaagctgatgggtgagatagagaatgagtaaggcacgcatgccgtaaaaactgaagtactcccagatttggatcgccacgatatagtatatcgcgcgcggctgactgggtgttttcatgtgttctccttatgagcaaaaaagggaagtggcaagccacttcccttgtacgagctaattattttttgctttcttctttcaataccttaacggtatagcggccatcagcctgacggtatgcaccgtgaatatcggtttcaaagcccggatagtgagcgccgatttcacacagcatctgcaggaactccagaaccggacggctttcttcggtgatcatttcacccggcattaccagaggaactcccggcgggtacggaaggatcatattggcgttaatacgacctaccatttcgtcgaggtaaacttcttcggtcataccgtgcagctctttctggaatgcagcatacggagtcattaccatcgtcggcagcacttcaaatgcgcgatacatcagatccggcagattgtggtgaacaatcagtttgtggatattctgagccagttcctgaatacgcatgttttcatagaattcaggatcttcacgatacagagacggcagcatgtttttcacacgcaggttcaggtcgaacgcacgtttaaagtcagtcagagcacgcagcaggctcagtgctttggtcttatcgataccgatgctgaacaggaacagcaggttatacggaccggttttctcaacaacgatgccatgttcgtcgaggtatttcgccacgatgctggccggaataccaaagtcgctcatggtgccgtctttttccatccccggagtcagcagggtgactttgatcgggtcaagatacatgtgctcgttatcgatgtttttgaagccgtgccaggtgctgtcagaacgcagcggccagcattcagtcgtatcgatatgatccggctgccatacatcaaagaaccagccatcagattccgttctcagacgtttgatctctttacggaatttgatcgcacgttcaatagaaccgttgatcagacgcttacctgcattgcctttcatcatcgccgcagcggtttcagtggacgccacgataccgtagtgcggagaagtggtggtgtgcatcatgtaggcttcgttaaaggtttcttcgtttacgtcacctttaacgtggatcatggaagcctgagagaacgccgccagcagtttgtgagtggactgggtttcgtaaatcactttcccttctacacggccaccgctcataccgcatttaccttcgtaaatcggactgaagttggtgtaaggcacccacgcggagtcaaagtggatggatttcacatccagtgttttcttgatgaagtcggtgttgtacagcagaccatcataggtagagttggtaattacagcatgtaccggccaggttgcgtttggtgtttctttcacgcgcttagcaatggtagcgtgctggaattcactctgtgggataccaccaagaataccgtaagcgttacgggtcgggcggaaatagattggcgtaacatcgctcatcatcatcaggtgggtcaggcttttgtggcagttacggtcaatcagaatggtgctgcctgctggagcagagtacataccaacaattttgttcgcagtggaagtaccgttggtcaccatgtagctgcggtctgcgttaaagacgcgagcgatatactgttctgcttctttgtgtggaccactgtgatccagcagagaacccagttcagatacactaatggaaatatcagatttcatggtattcggaccaaagaaatcatagaacaggctacctaccgggcttttctggaatgcagtaccgcccatgtgaccaggagtacagaaagtatatttaccttcacgaacatatttaaacagtgctttagtcagcggaggcagaatagtgttgatatattcgtcagtggtctgcttgatcttattagcaatatcttcagcagcacccagcgcatattcaaagaagctaatctgtaaacgcaggtcattcaggcttacatcgagagtggaatacgtattagcgaacgcgtacaacggcaggttctcgttcattttgctaatttcttcgcacagctcgagattatatttatcccagtcaaaaataacgccgcacagacgcgcattgttttcgatcagttttaataagtcgtcacggtcgttcgggtaaacaatctggaagttcagacgttcaagcgcgcgatgaagttcacggatgggttcttctttaaaataaacccccatgtgattcaatattgcaataacgttcatagtcatatctccaggtaaaaaaggcccctcccaacacatgggacaaaatgaaaggaggagcctcggaaaatacttttaattaatgtgcgttagacgcggtgtggttatccatactgtggctctggcgctcgtgcattttgcgagcgtagaacatcaggataatcaggctgacgatgaaggtacctgccagctcgaaggagcttgcgcccatcagcgcgatgaagcagaacacgcaacccagtacagagcagatcaggctgacaaagttgcggatgttaacgccttcaaaacgaatcaggtcaacgcaagagtagaaatacggcagcatagtcagcagtactgcgataccggtcagttcaccgaacaggtcagatgctttaccaccggcagagttcatcagagtgataaggatcatcagggcagtcattttcactgcagccagcagcagaccttttttcggaataccgttgctgtcgacttcaccataaactttcgggaagttaccgtcgttagcggcacgtacacctgcctggcctaccaacatcatccaggagcccagagaagtcaggcacgcaaaggcggtgaatgcagaaaccagcggcgcagcccagttaccgaggatagtactagcactgattgcaaacggagcaccggaagccgccattacagaagacggatacataccggaaagcacctgagtcgcagcgatgtaaacaatacctgctaaaccagtacccagcatggttgccagcggaacggtacgtttcgggtttttaaccataccagtacttacagctgcggattcaacacccacgaaggcccacaggcagagcagaatacttttaatgatcgcatgaccatcagtggtatccgcagtattccagttagctgcataagttgccgcatcaaaccaatgccagccaacaatagcagtcatcaccacaggaataagaaccagcaccagaccaatagtggttaaacggcttacccaagtaccgccgagcatatttacaaaggtaaatacccagacgatagcaatacaggcgatacccgccggaacaggatcatttaatactgggaagaaggtggaaagataagatacagcggtaataccaatcgccaggttaccaatccagttagcatggtaataaagaacacctgtctgaaaaccaaatgcaggggaaatttctccggcataagcaattgggccaccttgttgcgggttttttgttgccagtcgggcatatacatacgccaggctcattgcaccaataatagagataatccaaccccagatagcaataccaccgatacttgctaggttcgcaggtaataatgcaataccgctccccatcatattaccggcaacaacaccggtacaggcaaatagcccgatcttcttggcagaactcatgctcttctcctaatttcatttttgaatttggagtccgggtcatgatgtataactatttcctgaccagaccaaactggcgataagattactcacgaaaaaaggattaatcctaaagattaggtgaaataacacaaaagtttctgtaagtgagaacttgaggttttttattaacacatcaggatcgcaagttgatatcatgaaaagataaacatttaatgtttacaatggattgcgtgacattctctggttaaatttatgtaataaaaattatgcggcaaataaattgccgcaacatattataccaacaggaacatacaaaaactcaacaacaaatatttccgagcataaatcaacccggagttacttattcactagcaagaaatttgtcgagataaggtacaacataaggaacagaagtctggaatataccattttcaatccagtaaagggtgtttgcccctgggcgtaaattaaaggcggtgagatatgcatcagctgcttcccggttcatccccttcatttcataaaccttgccaagcaacacataatttagccaggacatttcaagatcaatgccagtatttatcgcctggtaagactcatctgttttaccttttaccagagcactgaccgcttttatttgatatataatggacaggttgttcaattccggcagtgtaacaatgttatctatttctgtgttcagtgctgctaattgtttttcatctaaaggatgttgagaatggcgcacgatatcaactaatgctttttctgctctcgcgtaggtaaattctggggaactttgaacaatctcacctaataattcactggcacggttcaaacttttatcatcgccatgcagtaaataatcatgtgcctgataaaaattagttaataacgcaccacgatgcggcaaaattttctggagcgtctcctgcattcgttgtggccacggttggtttaacgctttacttaaactctccagtaaatcattttgaatcgccagctgattaccgttagtgatgacataacgtttatccagcatggtactaccatctgcattgtctaccaattttatgctcataaagcattgttgagcacggtattggcgctgattaacaaacgcaatagataatgttttaccggaactgctcggttcatcaatgttgtagttgattttgtcatgcaccataaaggtggagaaggtgttaagacttgtcgccaccaaatcacccacgcctatcgcgtaagagagctgatacggggaactccagctgttacaacttttatttaccatattaatgtcaatatcgcgtggattgagcaaaatacggcttttgctcataggaagacgtgtatcaagactactaaacgctaccagtgctacacagatacctaagctcaacaggaaaaaaaaccatacccaaaaggtagtgaatcgtttgcttttaactggggattgttcaggtggcgttgcggtgttttgaatgttaagactgtgggagggagaatctgtggcaggaaccgcctctggtatagggggagggctagatagcattatttcctctccctcttcttcgctgtaccagataaccggcaccattaatttatagccgcgctttggtacagtagcgatatagacaggactatcttcatcattatcttttaaactcttacgtagttcactgatactctgcgtcacaacgtgattggtgacaatacttctcttccagacattatcgataagttcatccctgctaagtacttcgccactgtgttgagcaaagaaaaccagaagatcgattaatctcggctcaagggtaagttgacgcccattgcggctaatttggtttatggacggagtaacaagccattcgccaacgcgaactacaggttgttgcataatagaaactcattcgaaaagggaatgatgcaatgataattgccacaacctatttttaccatctatagatgggtttatttacatattattggtgaatgcaagacgttatttttaccagccataaacttcttgattacatagtattacgaaaggattttactgagaaccagaagtaatattccttaccatcaaaattcatcatctttgccaaagaaaaatgttcagaaaataatccatggaaaattgtccggagcacttactattttaatggattgttagtctttgcatgagcaagcgaactgatacatttctctttgttctcattcagaaaatctcatcagtcgccgttcagaccggtgttgtgctttatggatgcgttacgctcctgatgacgtcatttgacgttcaacagcatcacggggccgcacgacatttcacgtcagttagtgctatagctcaggaacaaattttcccgaattgggatatgcccgcaaattgctggtgatgtggggagaatctggttgagttcggtagaattgatttggaggcagaacgcttaaatcgtggcgtcctgaaacgaaaaacggacctccgtggaggtccgtttatatgaatttggtgcccggactcggaatcgaaccaaggacacggggattttcaatcccctgctctaccgactgagctatccgggcaacggggcgcattaaaccgtaatctgcacatctcgtcaacctaatttcagtaaaagcgattcaactgcttaagattgcggcaaatcgcttcttttctgtgtttctgtcaggtcaatgcaccaccctggcggcagcgggcgaagcgcaggatatcttccgccagccgatgtgcagtgtcgacatccgcctggctacgattcaccagcattcggcttaaacagccttccagcaccagttccatctgctttgctaccatcgccggatcgtcaacttccagtgtggttaacagttcgtgggtgaaatcgtaggccgcgcttttttgctgatcggccagttgatgaatagggtggccaggatcgggataaaacgtacaggcagcgataaatagacagcccggatagcggttgtttttaacgcactcgcttaacgcctgataacgtgccagcagcttttgttcggcggtttgcgtttcgtccagcatcagctgacgacgccagacatctatctgttggctaagataacgcagcgcatcgtagaggattgcctctttgtctggccagaagcggcgtagctcgtccagtggataatccacacgttcagcaaccatctccagcgtggtgttggcaatcccttgtaattctaataatttcagggcttctcccagtacatcttcacgttgcacgctattttcctccgtctttcccactgcaagtgtcgttcacggttggcgatcgcgcaaatgtgcgctgaaggtttcagcatccataaagcccgtgacgcgtgcttgtggatgctcctggccttgtccgtcaaaaaagagaattgtcggtaggccaaggacattaagatgctttaacagcgccacatcttgtgcgtcgttggccgtgacgttggcctgaagtaagaccgtgtctgctaacgctttttgcacctgcgggtcgctgaaggtgtatttctcaaactctttacaggcgacgcaccagtcggcataaagatctaacatcaccggtttgcctttggcttcaacgagcgcctgatttaactcatctaccgttttgatttgtgtaaagttgagatgcgtctgagtttgcgcggtatgcgtcgcaccaaatgcccaatcctgaagtgggcgcacgctaaccaatgccgctgccagcagaataatttgcacaatacgcatccagccgcgtttagcctgtaggctggtgataaaggcccagccaaagaatgcgacacccagcgcgctccacaagcgtaatccccatacatcaccaatcactcgctccagcaggaagaccggcagtgcgaggatcacaaaaccaaacgcggttttgacttgttccatccacgggccgcttttcggcagcaagcggttaccaaagacggtaattagcatcagcggcaggcccatgcccaacgcatagagataaagcgtgccgccgcccagccacatgttcccgctttgggcgatatacagcagaatcgcgctaagcggtgcggtggtgcatggactacagatcagtccggcaatcgcccccataacaaacacaccgccaggactgccgccctgttggcgattgctcatcaacgtgagacgtgtttgcaggctagaggggagttgcagggtaaacaagccaaacatactcatcgccagcaaggtaaagacgatggcgaggccaatgagcacgtatgggtgctgtagcgccgcctggaactgtaaccctgcggcggcaaccaccagacccagcgccgtgtaggtcagcgccatcccctgcacataaataaaggtcagcaacaatgctctggcagtggagagccgctgtttaccacccagcacgatgccagaaatcagtgggtacattggcagcacgcatggcgtaaaggcgataccaataccgatcaacaacgcccagagcgcggaaaagggcaattgcgcggtgggctgctcttgctgcggaacagacacaggctgtggcgctgcgttgttggcgaccacttcgcttaacggaacggttttggtttctggcggataacagaaaccggcatcagcacagccctggtaggtgacagttaacgtcgctcccgcactcgcctggttgatggtgacgggaagcgtcagccgatcgcggtaaatctcgcttttgccgtaaaactcatcttcatgccagacgccttgcggcagctgcacgtcggcaattttcgcgtgttccggcgtaatgcggatctgtttacggtagaggtagtaaccgtctttgatctgccaggtcagattaaggtcatgttggttttgctgaaaatcaaaagcaaaggcttgatccgcggggacaaattgactacgtcccggcgcgtcgaataatccggcaaaaacggaagtgctgcaaagtagcaggatcagcgtaaagatgcgttgagccatgagaggtaatctgtgtctccttatgtcagcgtaaagatgcgttgagccaactgaggtaatctgtgtctccgtgtgtaacaggtaaaaccagaagttccggggtttgatatggatgatgagacttcaggcattccagcagtgcctgctggtgagatacggtagtttttaaaatcatctgcacttcgtattcttgctccagcttaccttcccagtaatagagagaggtagcgccggggatcaaggtcgcgcaggccgccagtttttccgccagcactttggcggctaaatcctgggctgtcgcttcatctggtgccgtacatagcaccacgacagacgcggtattgctacttttttcatcaagcataaacacctcgcaagaacagatggaaccgcaagagagaggtcactatacaacggacgggggaaggatgttagtcggcgggaaagaaagcggggcgtgaacgccccgcgattgatcattacagcatgaagctacccagcacgaagccgaagcaaacggccagggcaacacccagagtacccgggatgaagaacggatggttgaagacgaatttaccgatacgggtagtacccgtgtcatccatctgtaccgcagcaaccagcgtcgggtaggtcggcagaatgaacagaccagacaccgcagcgaaagaagcaacagcggtcagcggactaacgttcagtgccagagccatcggcatcagtgcttttgcggttgcagcctgagagtacagcagagcagaagcaaagaagaagatgacggccagcagccacggatgaccctgaatcacttcaccagcggtatctttgatccagtcgatgttgttggaaacgaaagtatcgcccagccacgcaacacccaggatacaaatacaggcgctcatacctgctttgaaggtgctggagttgaggatgttgtcggtatcgactttacagataacggtggtcagagttgcaacgctgagcatgatgatcaggattgcgttggtggtgttcatcagcggtttttcaaccagacccatgcttgggctgttgatgattgcatagataaccacgccaactacgcccagcaggaacagccagacggacgtttttgcaccggatttgatttcaatctgcttttcaccgcgcagttcaaccaggccctcttccagacgcttgcgataaatcggatcgtcagagagtttggagttgaacagcatagtgaccaggaaggacatcaccagaaccgccagcagggtggacgggatgaccacggagagcagatggaggtagctgatgccatgaccttccatcacggaagacatgtaaaccactgccgcactgattgggcttgcggtgatcgcaatctgcgcggataccactgcagtagacagcggacggcaaggtttaacgccttgttccttcgcaacttcagcgataactggcagtgtcgccagagagatgttgccagtaccagcaaagatagtcaggaaataggtcacgatcggtgcgaggatcgtgatgtatttcgggttacggcgcagcagcttttctgtctgatgaaccagatagtccagaccgccagcaacctgcatggcagaaatagcggcgataaccgccatgataatggagatgacatcgaacgggatgttaccgggtttaacgccaatagcggcaagaaccagcacccccaatccgcctgcaaaaccaatacctattccccccaatctggcgcccaagaagatcgccagcaaaactatgatgagttctacaactagcatattagccttccttgttttttaacaagttgatattagattgttatttttaagttactgctcacaagaaaaaaggcacgtcatctgacgtgccttttttatttgtactaccctgtacgattactgttcgctttcatcagtatagcgttttgctttgtaagccgggtgcatcagattctgtacggagaaaatatcgtcaagttccgcttcagtcaacagaccgcgttccagaacgacttcacgtacactcttaccggtttcggcacagattttacccacgatgtcaccgttgtggtgaccgatgaacgggttcaggtaagtaacgataccgatagagttgtaaacgtaaccttcgcacacttctttgttagcagtgatgccgttaatgcatttttccagcaggttgtagcaagcgttggtcagaatgtgaacggattcgaacatggcctggccaatgaccggctccataacgttcaactgcagctgacctgcttctgctgccatggtaacagtggtgtcgttaccgatgactttgaagcatacctggttaaccacttccggaacaaccgggtttactttagctggcatgatggaagagcccgcctgcagttccggcaggttgatctcgttcaggccggcacgtgggccactagagagcaagcgcaggtcgttacagattttggacatcttcacagccaggcgtttcagcgcgccgtgaaccataacataagcgccgcagtcagaggtcgcttcgatcaggtcttcagccggtacgcatgggaagccagtaacttcagccagttttttcactgccagcggagagtactctttcggcgtgttcagaccagtaccgattgctgttgcaccaaggttaacttccagcagcagttcagcggtacgttggatgtttttcacttcttctttcagcaggatgctgaaagcgcggaattcctgaccgagggtcatcggtactgcgtcctgcagctgggtacgacccattttcaggatgtcctggaattcgacagctttacgttcaaagccttcacgcagttggttaatcgcatctaccagcttaatcagggaagagtaaactgcgatacggaaaccggtcgggtaggcgtcgttagtggactgacatttgttaacatggtcgttcgggttcaggtactgatattcacctttttggtgacccatcagttccagaccgatattggccagcacttcgttggtgttcatgtttacggaagtacctgcgccgccctggtagacgtctaccgggaactgatccatgcattttccgttgttcaggacttcatcacatgcggcaatgatggcattcgctacacttttaggaatggtttgcagctctttgtttgccatagctgcggcttttttaaccattaccataccgcgaacaaattcaggaatatcactgattttgttgttgctgatatagaagttttcaatcgctctcagagtgtgaacaccatagtaggcatcagctggaacttccctggtacccaacagatcttcttcgatacgaatgttgttactcatgtgaaccttctttttcaagctgccaatgatttgctttaaacacacagaatatatgtggtttcgaatgtttttcgaccgacgattatcccctgcatcgaccgaatacccgagatcatatgctgcttgaggatttctaccgtaatctggatcactttaagtgtcggtttttaccccttaattattaatttgtgaaatagatcaccgctttgggattactaccaaaaatagttgcgcaaacatcttgaaattttgctaatgaccacaatataagctaaacgcgattcgcaacccattcaggtagccggggttaaccggctgctattacaggagaaacctttgcgctggttaccttttattgccattttcctttatgtctatattgagattagtatctttattcaggttgcccatgtattgggggtattgctgaccctcgtgctggttatattcacgagtgttatcggtatgagtctggtacgtaaccagggctttaagaatttcgtgctgatgcagcaaaaaatggcggcgggtgaaaacccagcggcggagatgattaaaagtgttagcctgatcattgctggtttgctgcttttattaccgggcttttttaccgacttcctcggtcttctacttttattgccgccggtgcaaaagcatctgacagtgaagttgatgccgcatttgcgcttttctcgcatgcctggcggcggttttagcgccgggaccggtggcggtaatacttttgatggtgagtaccagcgaaaggatgatgagcgcgaccgccttgatcataaagacgatcgccaggattaatgtcgaaacgccggattatgtggttatgccattttccggcgtttttcgttttggcagcaacagccataaccccgccagcatgatcagcgcatagagacttttccagccgaccattgccagtaacagaacgcataacagcccgccaaccaccgccagtagtcgataacgtccttgcaataatttacagcctgccagcatgcataacagataaatcataataaagatgccattggcataaataataagagcgtccagattgatctctaaagcatgaatcaccaaagtgctcaccacacagcagccgagcaccgcattgagggcattattcgggatatggcgagaagagaggcgtgccaggtagtggtcaggattatgttgcgcctggctccagaccaggcgggcgaagctctgtatataaatgttgagactggcaaagcaggccagatagccaatcacgcaggcaatccataacgctcctacaccgaacaactgcactacaatttttggaaggcttgctgccgccgccattttttcaccataggcgtcgaagtgtaagacgactaccgtacagccccagtagactaatcctgccagcagcagaccaatcatcaaagcacgaggaaaatcacgctctggatttttaaattcgctggcgagatgggcaaatgcctccagaccgacaaaacaccagaacatcacacttaacgcagcaaataacccggtaagttcgatattaccaggtgccggaaaggggatattcgcaggtttgatatcgcccgcccaccagatagcgacaatcagcgcgacgataagtccggcaataacggtttgtagattagcactggaactggcaccgcgagtaccgatataccacaccagcgccagcgtaccgagttctgccaacaacagttgccagctatgccagccaaacatcgcctggccgaacccggcggcaatttgtagtgcggcaggcaaacccacgggaatgacgcttaaaaacagccagccggtgactcgctcaagccggctaccaaacgccataccgacgaagtgcgcgacgccgcctgcgctgggatagtggcgacccagaatcgcaaacacaatcgcaatcgggaacactaagataatcaaaacgggccacgcccacaggctgttattgcccgctaccagcgcagctaacgcaggaacggcaaacacgccagtgcctaataaactcgtgcttagcaggccaatgccctgggccagccccagttcttgtttgagtccactcatgggttgatgtccgattgcgcccaaattttgggcaactgcgtagattttcgatggtagcacaatcagattcgcttatgacggcgatgaagaaattgcgatgaaatgtgaggtgaatcagggttttcacccgattttgtgctgatcagaattttttttctttttcccccttgaaggggcgaagcctcatccccatttctctggtcaccagccgggaaaccacgtaagctccggcgtcacccataacagatacggactttctcaaaggagagttatcaatgaatattcgtccattgcatgatcgcgtgatcgtcaagcgtaaagaagttgaaactaaatctgctggcggcatcgttctgaccggctctgcagcggctaaatccacccgcggcgaagtgctggctgtcggcaatggccgtatccttgaaaatggcgaagtgaagccgctggatgtgaaagttggcgacatcgttattttcaacgatggctacggtgtgaaatctgagaagatcgacaatgaagaagtgttgatcatgtccgaaagcgacattctggcaattgttgaagcgtaatccgcgcacgacactgaacatacgaatttaaggaataaagataatggcagctaaagacgtaaaattcggtaacgacgctcgtgtgaaaatgctgcgcggcgtaaacgtactggcagatgcagtgaaagttaccctcggtccaaaaggccgtaacgtagttctggataaatctttcggtgcaccgaccatcaccaaagatggtgtttccgttgctcgtgaaatcgaactggaagacaagttcgaaaatatgggtgcgcagatggtgaaagaagttgcctctaaagcaaacgacgctgcaggcgacggtaccaccactgcaaccgtactggctcaggctatcatcactgaaggtctgaaagctgttgctgcgggcatgaacccgatggacctgaaacgtggtatcgacaaagcggttaccgctgcagttgaagaactgaaagcgctgtccgtaccatgctctgactctaaagcgattgctcaggttggtaccatctccgctaactccgacgaaaccgtaggtaaactgatcgctgaagcgatggacaaagtcggtaaagaaggcgttatcaccgttgaagacggtaccggtctgcaggacgaactggacgtggttgaaggtatgcagttcgaccgtggctacctgtctccttacttcatcaacaagccggaaactggcgcagtagaactggaaagcccgttcatcctgctggctgacaagaaaatctccaacatccgcgaaatgctgccggttctggaagctgttgccaaagcaggcaaaccgctgctgatcatcgctgaagatgtagaaggcgaagcgctggcaactctggttgttaacaccatgcgtggcatcgtgaaagtcgctgcggttaaagcaccgggcttcggcgatcgtcgtaaagctatgctgcaggatatcgcaaccctgactggcggtaccgtgatctctgaagagatcggtatggagctggaaaaagcaaccctggaagacctgggtcaggctaaacgtgttgtgatcaacaaagacaccaccactatcatcgatggcgtgggtgaagaagctgcaatccagggccgtgttgctcagatccgtcagcagattgaagaagcaacttctgactacgaccgtgaaaaactgcaggaacgcgtagcgaaactggcaggcggcgttgcagttatcaaagtgggtgctgctaccgaagttgaaatgaaagagaaaaaagcacgcgttgaagatgccctgcacgcgacccgtgctgcggtagaagaaggcgtggttgctggtggtggtgttgcgctgatccgcgtagcgtctaaactggctgacctgcgtggtcagaacgaagaccagaacgtgggtatcaaagttgcactgcgtgcaatggaagctccgctgcgtcagatcgtattgaactgcggcgaagaaccgtctgttgttgctaacaccgttaaaggcggcgacggcaactacggttacaacgcagcaaccgaagaatacggcaacatgatcgacatgggtatcctggatccaaccaaagtaactcgttctgctctgcagtacgcagcttctgtggctggcctgatgatcaccaccgaatgcatggttaccgacctgccgaaaaacgatgcagctgacttaggcgctgctggcggtatgggcggcatgggtggcatgggcggcatgatgtaattgccctgcacctcgcagaaataaacaaacccccgggcagaaatgtctgggggtttttcttttggtcatctttctagtataagattcagacacggacgacgcgagtggcgtccagctcattgattatggggaataacatgcacgtaaaatacttagcagggattgtcggtgccgcgctactgatggcgggttgtagctccagcaacgaattgagtgctgccggtcagagtgtacgcattgtggacgagcagccaggcgcagagtgccagctgattggtactgcgacaggtaagcaaagcaactggctttccgggcaacacggagaagaaggcggttctatgcgcggcgcagcaaacgatctgcgcaaccaggcggctgcaatgggcggtaacgtgatttatggcatcagtagcccgagccagggaatgttgtccagttttgtcccgacggatagccagattatcggtcaggtttataagtgcccgaactgatgtgatccagaggctgggtgacaaacgtataattgcctgatgcgcttcgcttatcaggcctacataaggcattgcaactgattgaatgcttgagaatttgtaggccggataaggcgtttacgccgcatccggcatgaccaacgatcacgttatcagtcatttcaggctggatggctccagcctcgcattagcaaagatgagattatttcgcctgtggtgcagttttgctggtggattgaacacgtaagtgatgcagcgcgcgtaagcattgatcctgggttagcggttgggcgttattcgccgctacggtgcgaacatagacctgacatggcacacccgcgagttttttcagtcgtgggctgaaatcaagcattcggcgagtgatcgcttctatttctttacccggcgttgcttcacgcgttttcaccactgcgccgctaaattgttctttgccactttcatctttaaagcggtaaagcaccgccagataatggtcgaacaagttatgtttccattccggttgggaataggtgtcatattccagattgccattgtcctggcagtcaacgtcgtataacggcaggaaatctaacagactggtaatacgtaatgccagttcacgcatttccgcattattaattgcatgaatgattgctcgcgccagcatttcaatctgcaactcattgacgactaactcacatttgctaccgtcatgtagcgttaatacgaaggtaagattttcgccttgattatcggtaagttccagcgtgttaacccgacgattaatatcggcatttttaagctcatcaaccagaatttctgggatgttttctgccattttcttaatgactttatcgcgagcttgctcatactgaaggtgtgcagcagcatccagtttatgcttttgatgcagacgactttccagcgcaatcagcaggtcgcgcagttccatgacagacataaagaacaagctttctttattgcgaggttctttaattttcagcgccagtgcaatgaaattattactcttgcgaataacaccggtattaacacccttgatgcttatggccatgtaggttctccctaaccatttctcaattaaataattaattttaatttataagccagataaatgggcttggtagtaatagttgttaaaataacataaatagccgtactcactctatataaacagaaaagaaaggttaattattggtgttagctatataaaaagtaacaacagcaatgcatatgaataattaaaggttatgcaacgggcaaagattaaacttcccagtttaatgacaggttgctgtacttgcgtttgttgctcttgccggatgcagcgtaaacgccttatccggcctacagttcattgcaaatccattcaatttcaatgcacgatgtaggcctgataagcgtagcgaatcaggcaattttaatgtttaacttccctgtttaatcagttactgctggcgtagctggagatccagcggcgttttgctgggttcgccgccaatttctcgcgccagtttcggcaccagatatccgctcaccagtgtcagcaactcacgcataatctgccgtgcttcgtcatcactcaccataaaatgcgccgcgccctgtactttatcgagcacatgcaggtaatacggcattacgccggcatcgaacaacgcattactcaggtttgccagcgtttgtgcgttatcgttcacatcacgtaacagaacgctctggttcagcaaagtaacgcctacccggcgcaacttagccatcgcctgacggaatgtttcatctacctcattggcatggttgatgtgattcaccagcaagatttgcagcgtagaacgggcaaagcattcaaccagcgcctcggtgatacgtgccgggatcacaatcggcagacggctgtgaatccgcagacgttttatatgcgggatggcttccagttgtgtgagcaaccagtccagctcgtgatctttcgccatcagcggatcgccgccggagaaaatcatctcgtccagttccggatgcgcagcaacatactcaagtgcagtttgccagttacgcttgttgccctgattttcggcataggggaagtgacgacggaagcaatagcggcaatttaccgcgcagccgcctttgaccagcaaaagcgcccggttgtggtatttatgcaacaaaccaggcactacgctgtgctgttcttccagtgggtcggtggagaatccgggcgcgatgacaaactcatcttggctggtaagtacctgacgcaaaagaggatcgtccggattgcctttctccatgcgatcgataaaactgcggggcacacgcagggcaaaaagctttttggcgctgcgtccggctaacagtttttcctccgcgtctatattcaaaagacgcagaagttcatcaggatcggtcacaacatcggcaagttgcgttaaccaatcttctctggatggggtatttagggttacaatatgcgccattttgtggcttagctaccaattaacaaatttcagagggccttatggcaacgtactatagcaacgattttcgtgctggtcttaaaatcatgttagacggcgaaccttacgcggttgaagcgagtgaattcgtaaaaccgggtaaaggccaggcatttgctcgcgttaaactgcgtcgtctgctgaccggtactcgcgtagaaaaaaccttcaaatctactgattccgctgaaggcgctgatgttgtcgatatgaacctgacttacctgtacaacgacggtgagttctggcacttcatgaacaacgaaactttcgagcagctgtctgctgatgcaaaagcaattggtgacaacgctaaatggctgctggatcaggcagagtgtatcgtaactctgtggaatggtcagccgatctccgttactccgccgaacttcgttgaactggaaatcgttgataccgatccgggcctgaaaggtgataccgcaggtactggtggcaaaccggctaccctgtctactggcgctgtggttaaagttccgctgtttgtacaaatcggcgaagtcatcaaagtggatacccgctctggtgaatacgtctctcgcgtgaagtaatgcggttgtggtgcggcctgcaggctgcaccatcacttattcaggtcagagatgatgaaacgccttatcgttcttgttttgcttgccagcacgctgctcacgggctgtaacaccgctcgcggtttcggcgaagacatcaaacatctcggcaactccatctctcgcgctgccagctaatttttcttctcttccgaaaaatcatcagattcccatcatttttggcgatgttgtctattattaatttgctataggcaaacataaataacattacctaaaaggaagacgttatggtgaagaagacaattgcagcgatcttttctgttctggtgcttagtacagtattaactgcctgcaacaccacgcgtggcgttggtgaagacatttctgatggcggtaacgcgatttctggcgcagcaacgaaagcgcagcaataagcaataacggtacgacagctgtgtcgtgccgtttgttttttctgcgatagtcacaaaggtaatagttgaaattcccctgccacctggcaaaatatccgttcaaccatcagctttgcaggacgacctgcaaacgcctcttttcaccggggacggccccaattctccggagcctgatatgtcctggattatcttagttattgctggtctgctggaagtggtatgggccgttggcctgaaatatacccacggctttagtcgtttgacgccgagtgttattactgtgacggcgatgattgtcagtatggcgctacttgcctgggcgatgaaaagcttaccagtagggacggcttatgccgtgtggacgggtattggcgcagtcggcgcggccataaccggcattgtgctgctcggtgagtccgctaacccgatgcgcctggcgagtctggcgttaatcgtattggggattattggtctgaaactcagcactcattaactaccaggctgctgtacccaaataaatttactgacatcaaacccttcccgggtcgcgactgccagcatctcctgtttcacttcgtcagaaatggttggcgtgcgggagagtatccacaggtagtcgcggtccgggccgcaaaccagcgcatggcggtattcccgatcgagtgcaataacgttataaccgccatagaaaggaccaaagaaactcactttcagcgcagcgcgagttggtgcgccggtaaagtacgctttcccttcactctgctgccacattcctctgtcagggttatagcctttattaatgacattcaggccgccgtcatcacgcaggctgtatgttgcggtgactttttccagtccacgttcaaagcggtgatcaaaacgggcaatctcataccaggtaccgagataacgtttggcgtcgaaattatttactacggtcacgccacgcggcggcgtaggagaactgcaggcaacgaccagaaatgcagctgtcgctgcggcaacgagagggagcaggcgcataaatgtttccttactggtttttttctaagtgtagatgacagcaaggaaaagcggagaaaaggtccgaaaattcggacccgatggaattttactgtagagcgttaagaatctgccaggcggcgtcgactctcgctggattgggatagtttttgtttgccagcatcacgatacccagctctttttctggaataaacgcgacatagctaccaaatccgccggtcgcccctgttttatgtacccaacttgcgcgtactgcaggagttgggggcgtaatcgcttttacggggcgtgctgccagtgcaattttattgtcactgccgttaatgatgctgtcaggatttaccggccagtccagcatttcccagcccaggccctgatacatatcgccggtttgccagtagcgagattgtgccagttgtatcccttgttgaagcgttttctcattgatatcaaggggttttaaattgctttgcacccagcgggccatatcttcaatggtgctcttcacaccataagcttcagcatctaacgccccagggctaacatgcactgccttaccttcgcgatatccccaggcgtaattcttttcttctgcgggcggtacattaatccacgtatggttgagtttgagtggctggaagacacgagtttgcatcgcctgctcaaaactcaaaccagacggcttcacagccagtgcgccgaacaaaccgatactggagttggcatacagacgttgtgttcctggagcccatgcaggctgccagttttgatagaagcgcagcaagtcgctactggatttcacctcatccggcacctgcaatggcaggccgccagcagtgtaggttgcgagatgtaatagtgtgatcccattccactgtttagcggtaagttcaggccagtattttgttgtgggatcgcttaacttgatttcccctcgagcaatagcgtcgccaccaagcacgccagtaaatgttttgctgacgctacctaactcaaacaacgtttgctgtgtgacgggctgctttttggcgatgtccgcatagccccaggtaaagtaataaggtttaccctgataaattaccgccaccgccatacccgggatcttttgttgctctataagcggggtaattgtgcgatgcacaatatcgttgatttgttgaggggcagcaaatgtggagcaagaggcggtaattaataaggcgcagagcgtcgttttgaacatagggtctggtttccatacaaaacggcccgccataggcgggccggatttacattggcgatgcgttagattgtaacgacaccaatcagcgtgacaactgtcaggatagcagccagaccgtagaaaacccatttgcccgcaggtacgtggattttcagatcgtgcatcgcgtggtgcatacggtgtaaaccacaccacagcggcagaacgatcatcaggaacaggaatacgcgaccaatgaagctctgcgcgaacgccagaacgcgctcgtagctcagcgcatcacccggaaacaaccccagtggcagcagaatacccaccagcaggatcatcaccggcgcaatgatggcgctccacataccaccggccccgaagaggccccagaataccggttcgtcagaacgctttggatttggattaatcatctcaggctccttaccagtacagggcaacaaacaggattacgatggtggcaaccacagttaccgcccagagacttttgataattggctctggtcccattttttcgtcttttacaatgatattggccgctttcggtgccagttcaaaccaggttttggtgtgcagcagagctgccgccagagtgatcaggttaatgatcacgataaccgggttttgtaaaaagtcgacgaatcccgcccaggcttccgggccatttttcagggcaaacagcccgaaaatcagttcaatgctgaaccacacagccggaaccgccgtgccttcgcgcagcatgtaaaagcgataaaacggcaattttttccaccaggtggacgtcattggccgtacatacggtttacgtttagtcgtcatgttgcactccttagcgtggtttcagggtcgcgataagaaagtctttgctactttctactttgccctgctgaatggccgcagccggatcgacgtgtttcgggcagacttcggagcagtagcccacgaaagtacagctccatacgccgttctggctgttcaactgcgccatacgctccttcttaccgtggtcgcggctatcttcgttataacgatgcgccagcgtaatggcagccggaccgatgaactctgggttcaggccaaactgcgggcacgcggcgtagcacaaaccacagttgatgcaaccggagaactggtgatacttcgccatctgcgccggggtctggatgttagtaccctgatccgcggtgcgggagttgccgatgatgtacggtttgatcgcttccagactttcgatgaagtgggtcatatcgaccaccagatcgcgttcaatcgggaagttagctaacgcttcaaccttcataccgtcggtgtaatcacgcaggaaggttttacatgccagttttggcacgttgttaaccatcatgccgcaggaaccacaaatcgccatacggcaggaccagcggtagctcaggtccggtgccaggttgtctttgatgtagcccagcgcatccagtaaactggtagttgcgtcataaggcacttcatagaatgcgctatgcggtgcggtatcgacttccgggttatagcgcaccacctcaattttcaggtttttcatctcagccattcgccttctccttcttattggctgcttccgccttatcggctgcatccgcttcgccaccgtaaacgcgtttagctggcggcagcgtagtaatcttcacgtcgctgtactccaggcgagtcgtgccatcagcatcgcggaaggcgagggtgtgtttgaggaagttgacgtcgtcacgctcggtgcaaccttcgtccagacgctggtgcgcgccgcgggactctttacgtgccattgcggagtgcgccatacattcagcaacgttcagaccgtggcccagttcaatggtgtagagcaggtcggtgttgaacacgctggaagtgtcggtgatgcgcacgcgcttgaagcgttcctgcagctctgccagcttgtcgatggttttctgcatcagttccggcgtacggtagataccgcagccttcttccatagccaggcccatttcgtcgcggatcttcgcccagttttcgccgccatcctggttaaccagatctttcagacgttgttcaacgccagctgcctgcgcttcaattgccgcttcgttgccattaccggcagttgctgcacgctctgtcgcttgttcaccggccagacggccgaagaccaccagttccgccagggagttagaacccagacggtttgcaccgtgcagaccaacagaggaacattcacccacggcgaacagacctttaatgcgggtttcacagttctgatcggtttcgataccgcccatggtgtagtgtgcggtcggacgtaccggaatcggttctttaaccggatcgacgccaacgtacgctttcgccagttcgcagatgaacggcagacgttcatgcagttttttctcgccgaggtgacgcaagtcgagataaaccacatcgccacgcggcgtggagatggtgttgcctttacgccattcgtgccagaaggcctgagagactttgtcgcgtggacccagttccatatatttgtttttcggctcgcccagcggagtttccgggcccatgccgtaatcttgcagataacggtagccatttttgttgaccagaataccgccttcaccgcggcaaccttcggtcatcaggataccggaacctggcagaccggttgggtgatactgaacgaattccatgtcacgcagcggaacgccgtggcttagcgccatacccataccgtcaccggtaacgatgccgccgttggtgttgtaacgataaacgcgacccgcaccgccagtagccataacgaccgcgttagcacggatctgcaccagcgtgccttccatcatgttcattgctaccaggccgcgaacatgaccatcatcaaccagaatatccagcacgaaatgttcgtcaaaacgctggatctgcgggaattgcagagaggtctggaacagcgtgtgcagcatatggaagccggtcttatcggcggcgaaccaggtgcgctcgattttcatgccgccgaagcgacgtacgttgacgctaccatccgggcgacggctccatgggcatccccacagttccagttgggtcatttcggttgggcagtggtggacgaaataatccacgacatcctgctcacacaaccagtcgccacccgctactgtatcgtgaaagtgatattcgaagctgtcatgatcctgcgcgacagcggcggagcccccttctgcagcaacggtatggctacgcatcgggtatactttactgattagtgcgatttttgcattcggatttgcctgcgcggcagcaattgcagcacgtaatcccgcgccaccggcgcctacaatggcaagatcggcttgaaaggtttgcacgacattcctccagattgtttttatcccacagccacgtacttcagggtaagtacctgaaagttacggtctgcgaacgctattccactgctcctttataggtacaacagtatagtctgatggataagtctgaaatttgacgagatcgatttttttagtgcgcaagagggctaaattatcactgaagatgattaatttaattactaaaccatcagatcgtgctttttttagtcactgcccaccgctgtttgattcctgcgtaaaatttgtctcgccgtcgcgttgcgagtagacttcgtgcccttgtcaaaaactggagatttaactatgagcgaaacggcatcctggcagccgagcgcatccattcctaacttattaaaacgcgcggcgattatggcggagatccgtcgtttctttgccgatcgtggagtgctggaggtggagacgccttgtatgagccaggcgacggtaaccgatattcatttggtcccgtttgagacacgtttcgttggccccgggcatagccaggggatgaatctctggttaatgaccagcccggaataccatatgaaacgcctgctggttgccggttgtgggccggtattccagctgtgccgcagcttccgtaatgaagagatggggcgttatcacaaccctgagttcactatgctggagtggtatcgaccgcactatgatatgtaccggttgatgaacgaggtggacgatctcttacaacaggtgctggactgcccggcagcagaaagcctttcttatcaacaagctttcttgcgttatctggaaattgacccgctctctgccgacaaaacgcaactgcgggaagtcgcagcgaaactggatttgagcaatgttgctgataccgaagaagaccgcgacacgctgctacaattgctgtttacctttggcgtagagccaaatattggcaaagaaaaaccgacctttgtgtaccactttccagccagccaggcaagtctggcgcaaatcagtaccgaagatcatcgggtcgctgaacgctttgaggtttattataaaggtattgagctggcgaatggtttccatgaattgacggatgcccgtgagcagcaacaacgctttgaacaagataaccgtaagcgcgcggcgcgcggtttgccgcagcaccccattgaccagaatctgattgaagccttgaaagtcggtatgcctgactgttccggcgtggcattaggtgttgatcgtctggtgatgttggcgctgggcgcggagacactggctgaagtcatcgcctttagcgttgaccgggcataattctgaaaaattactgaattaacagcgaagaatggcgtgataagcgccattctgtagcatatgttttcatttttccgttaaaggccacaatttaagactggatatttgatatcatccaggtatcaattctgtattggtttttacgctgcctgctcaatgttgcgcagtgcagttcagtgggcacgtgttatacacgcgctgaaatgaaggatggtttcatgcctcacacgataaaaaagatgagtctgataggactcatattgatgatctttacttccgtatttggatttgccaatagcccaagcgcttattacttaatgggttatagtgcgattcccttttatatattttctgcattgttattctttattccattcgccttaatgatggctgaaatgggagctgcttatcgcaaagaagaaggcggtatctattcctggatgaataatagtgtcggaccacgttttgccttcattggtacgtttatgtggttttcctcttatatcatctggatggtgagtacctccgcgaaagtttgggtaccgttcagtacattcctctatggtagcgacatgacccagcactggcgtattgccggactggagcctacgcaggtggttggtctgctggctgtggcatggatgattctggtcaccgtcgttgcttctaaggggattaataaaattgcccgcattactgcggtgggcggtattgcagtaatgtgtctgaatttagtattgctgttagtaagcattactattttgttattaaatggtgggcatttcgcgcaggatattaatttccttgcaagtccgaacccgggttatcagtccggtctggcaatgctaagctttgtggtatttgccatttttgcctatggcggaattgaagcggttggtggtctggtcgataaaacggaaaatccagaaaagaactttgccaaaggtattgtttttgccgctattgttattagtatcggttatagcctggcaatatttttatggggcgtcagcacaaactggcagcaggtattaagtaatggttccgttaacctcggcaatattacctatgtgctgatgaagagccttgggatgacgctgggtaatgcactgcatttgagtcctgaagcgagtttgagcctgggcgtatggtttgcgcgtattactggacttagcatgttcctcgcctataccggtgcgttctttacgctttgctatagtccgttgaaagccatcatccaggggacgccgaaagcattgtggccggaaccgatgacgcgcctgaatgcgatggggatgccgtctatcgccatgtggatgcagtgcgggttggttactgtcttcatcctgctggttagctttggtggcggtaccgcaagcgcgttctttaacaagctgacgctgatggcgaacgtgtctatgacgcttccttacctgttcctcgcgctggctttcccgttctttaaagcacgtcaggatctcgacagaccgtttgtgattttcaaaacgcatttgagcgcaatgattgcgacagtggttgtcgtactggtggtgacatttgcgaacgtcttcaccatcattcaacctgtggttgaagccggagactgggacagcacattgtggatgattggcggccctgtcttcttcagcctgttagcgatggcgatttaccagaactattgcagcagagtggcaaaaaatccgcagtgggcggtggaataacccgatgccctatcgtctacctgacgatagggcgtaaagacaggaaatgttatggatgacaccagccgggacccggcaataaccgaagatgaaatcagggcgctgcaattttctgccggggatgtagcggaaatagagcagacgattctctcttttgtcgatgcctgccacacccgtaaagtggcgatggtggtgggtagcaccattaacaccctcaaagatcgcgatggtaaacggtggggaaacctgccggatatttattgcgcttatcttatccgatgtctggtttttcgcggggaattagtgggatacggcgatttgtttcgtatgcgctatagcgaaattaagcgaccggttaccttatgagtgcgcgcatgtttgtcttatgctgcatctggtttattgtggcgttcctctggataaccatcacttccgcgctggacaaagagtggatgattgatggacgcgggattaacaacgtctgcgatgtgttgatgtatctcgaagaagacgatacccgtgatgttggtgtgataatgacgttaccgctctttttcccttttctctggttcgctttgtggcgaaaaaaacgcggctggtttatgtacgccaccgcgctggctattttcggctactggctgtggcagttttttctgcgctatcagttttgtttgtgagccggattggttcatccggcacacaaacttacaaacttcccgcctgacgacctttgcccgcagacgtcagcgttctccccgtttgtttaccgttgaggctttccagacgcatctggaagggcgggaatggcatatcgataccgtgggcatggaagccagccagaatcagctggtggatctcatggcgtagcggcatacggtgacccatctcagcggcgtaaatacgcagctcgaaaatctgaatcccctgttgcagatccaccaggaagacttccggtgccgggttgtcgatcaccaggctgcagcgacgcgctgcggtgagcaggatttccgtcacttcttcgctattggcatcggcaggggccggtatcgtcaacaccacgcgcgtgacgctgtcagagaggctccagttgataaactgctcggtaataaacgccttgttcggcacgattatctctttacggtcccagtcgctgatggtggtggcgcgggtgttaattttcgtcacgctaccggtgagatcgcgaattgtcaccgtatcgccaatgcgaatcggtttttcgaacaggataatcagaccagagataaagttggcgaaaatttcctgcaaaccaaaaccgagaccaacaccgagcgcggcaaccagccactgcaatttgctccactcaataccaatcatactgaagccgaccagcccgccaatcagcatcagcagatatttggtgatggtggtgatggcgtaacccgtacccggcgttaaatccaggtgctgcaaaatcgccagttccagcagcgcgggcaagttgcgcaccagctgcgtggtgatgataaacaccagaatggcaatcagcaccgcaccgagggtaattggctccagactttctacgccctgtaccgtggaggtgacatcccacaggctaatattttcgaggaagccgaaagcggaatggatttcactccacagcacaatgacagaaagcagggcgatcaacatcaaaatactgcgcaccagccgcaaggattgcgcactgatggcatcgagatcgacttcgctttcatcgacttcaattgctccttccgggctactgtgatgatgcgcttcctcttcgccacgcgcacgttgcgctaacatctctgcccggcgatgcttcgcccgatcaaacgccagcctgcggcgctggatcagcatccagcggcggataacgtgataaaccaccagtagcaggaaccagatggcaacgctggtttcaagcctcgctaacagcgcctgtgccgttgccagataacccaccgcgctcgccagaatggcaaccaacggcgcgccaatcatcatgttccacagcatatggttggtaatgttgtcgccgctgccctctttgttgagatacagcggaatcccggcctttttcaggctgagggtgaccaccgccagcgcaccgcaaatgaggataaagcaaagccgtcccaggctaccggagaattcacggtcgtcgaggttatcgaacatcatcagcgccataatcagcggcacaataagcccgatgctcatcaggtagtagcgcatcccacgggaaacacgttcgcgcggccagccaaaatgagcgataaacaagccgttcgggcgggcaaaggtggcgcaaatcatcactacccacagcagcggcacggtggccgttacaccatcgccaatcgcgaccgccagcggataaggccacgcctcgcgcaagccgtaacccagcgtcatccacagcaccggtaacggactcgcgacgagaatgctccagaaaagagtgcgcaacgtcagccagaagtgatcctgagtcactttgccaactttcgccgcgctacgttcaagaaaacgggtgaaatagcggcggctgtaaatactgcaaccgaccagaatcaacgcgccaaacagcggcaaaattgtctctttgctggtcagcatcatcacactggctttgcccaactgactgaaggtgtccaggctaatgagacgacgcagatcctgggcgatttccagcggccaggcgatggtcatcgggcgcacgtcagaggtccagaacagatagcggtgcgttgcttcgttcacctctttcagcgcatcctccagttgcccgttggagactttcagcttggtcagttccaatagtagcgtgtcgccaccctgcaacaaactgttcagcaactcacgctgagtgcgcagttgtgcttccagaatacggttttgctcggcagtcagcggctgaccgtcggcctgatgaatttgccgtagcagcggctgtttattaagcagatcctcataacgtaaccgttgcacacgcaactgcgccatttcggtatcaagctgttgtggtttcggcatttccggcagccgtgccacctgcgcccgcagcgcttcgccgagcagattggagcttcccagccattggctctgttcacgcagcgtattcaacgcctgccggacctgtaacgtctggctggcagcctgacgctgttggctggcaacgagatccatccgctgcgcctgttgattcaaagccgcgcttagttcgcggttaattttgaattgcgcgacgatatctttcggcaaatcggcgctgttttctgccagcaattcggtactttccagcgcccgctccgcctcaagctgacgttggctgtttaattgattacgcaaggcctgcaaatacgcatccagttgctggctctctttttccgccagctcactgcgtaagcgcgctaattcctggcggttattggcagacagctgcgccagctccagttcatcaacgagcgccttaagacgtgcagagtcagactgcaacgcgaaattttgtgcctgattgagcggagtattgccggtaagcgttcccaggcggcgctcgatctcatttaactgacggcgggcgtcggtttgctgttgcggcagttgattcaggctatcggcaatctcgcgggcgcgctcctgctcttgctgggcctgacggcttttatccagcaactggctgctgacctggagaatttcctgattcagcgcgtcggtagacattcccgggctcacgctgcgcggctcgtcacgcatgttgtttaattgtgcgcgcagagtagcggagagtttcggataattatcgataacttgctgatattgtttgatgcgctcaagggaaccttttcgttcctcaagcgcatttaaggcagactggagcgcctctacgacttccggctgtgcgggtttcgccgcttttgcctgctccagttcctgagtgatttgtttgctatcgggggccgtcgcggcgtacgccccccaactgaggcaccaggccatcagaaaagtgataatcaggcgcacgtcagcgtttcctttgatggattagacctggtcttttttgtcgtcaaccaatgggctggcgtcgtgttctgcttcgatctcttcagcaggaagcggggcaggttcagcgtctggcgtaacaaaggtttcggtagatactgccagcggctggccaattttcgtgacagacaggctttccagttgctcaaccagattcactttacccggtgcaaacaggttgataacggtggaaccgagtttaaagcgacccatttcctggcctttcagcagtgccacagaaccgtcgttttccccggcaggccaggtccagcgcttgatgataccttcgcgcggcggcgtaatggtgcccgcccagaccgtctcaatgctgccaacaatcgtcgctccgaccagaatctgcgccattgggccaaattcggtatcgaaaaggcaaatcacgcgttcgttacgggcaaacagattcggcacgttctgagccgtgagatggttaacggagaagagatcgcccggcacgtagatcatctcacgcagaataccgttgcacggcatgtgtacgcggtggtagtcacgcggggagaggtaagtggtcacaaacgtaccgttgcggaacaggtccgccatcagatagttgcctgccagcagggcttcgaggctgtagttgtggcctttggcttgcaggattttatcttcttcgattttacccaactggctgataacgccatcggcaggcatgaccagtacattcggatcggtatcgattgggcgtacttcgtcacgcagcggacggacaaagaattcgttaaaggtgcggtagctggcggtgtccggcttttgcgcctctttcatgtcgaccttgtagtatttaacgaacagatcgataaccagttttgtcagccatcctgcccgcttgcttgcgccccaacccgccaggcgagtaagccatagtttcggcagaatgtactgtaggctaagtttaaaactatttaacaaggtagcctccaggccattgttttgtcgttcctgatccggcctacatgccggatcctgaaaaaaaggggacgattctaacgacggttagcttaattgtcagtcatccgtatcagaaaagtttttacgcgtttttacctgcgccatgctttccagaatacggtgatagttttcgaaacgggtttccgcgattttcccttcctcaaccgcttcccggatagcgcagcccggatcggtatcgtgtttgcaatcgcgatatttacacagacctaaatagtcatggaattcgacaaagccctgagtgatttgttccggctccaggtgccagaggccgaactcacgcactcctggggagtcaatcacatcaccgccgtgcgggaagtgatacagccgagcggcggtcgtggtgtgctgaccgagcccgctgttgtcagagatatcgttggtcaggatctctttttgcagccccagcaacgcattcagcaggctggatttgccgacgccagactgcccggcaaaaatgctgatgcgcccggtcaacgcctcttccagcggttttagcccatcctgagtatggctggaaaccatcaatacgcgataaccgatattgcggtagatatccatctgctcgttgacgaacgccatgccttcgtcgtccagcaggtctatcttgttgagcacaataatcggctcaatctgcaaggtttcgcaggccaccaggtaacggtcgataatattgaggctcagctccggcaaaatggcggagacaatgacaatctggtcgatgttggcggcaataggttttacgccgtcgtagaaatccggacgcgtcaacacgctggtacgctcatgcaccgcttccacgatccctttgacatttacgccttccgccgccggtttacccggacgccagactacgcggtcgccggttaccaggctacggatggtacggcgaatattgcagcggtgaacgtcgccatcggcggattccacatcagcgtgcataccaaagcggctgatgacgataccttcatcaggctcgccaaacagattgtcgtcgtagtcgggcttctccttagacgttttaagacgacgctggtgattggcgttcacgcggcgctgctggcctttggagagtttatttttactcaatcgtacagactcctggtcgcccctgatgggcaaaacatctatgatacacgcaattgtggatcaatatagtcactgtgaatgggtggaaaatagcatgagtgccaatgaaaacaacctgatttggatcgatcttgagatgaccggtctggatcccgagcgcgatcgcattattgagattgccacgctggtgaccgatgccaacctgaatattctggcagaagggccgaccattgcagtacaccagtctgatgaacagctggcgctgatggatgactggaacgtgcgcacccataccgccagcgggctggtagagcgcgtgaaagcgagcacgatgggcgatcgggaagctgaactggcaacgctcgaatttttaaaacagtgggtgcctgcgggaaaaagcccgatttgcggtaacagcatcggtcaggaccgtcgtttcctgtttaaatacatgccggagctggaagcctacttccactaccgttatctcgatgtcagcaccctgaaagagctggcgcgccgctggaagccggaaattctggatggttttaccaagcaggggacgcatcaggcgatggatgatatccgtgaaagcgtggcggagctggcttactaccgcgagcattttatcaagctgtaaaatttttcctggtcacgtaagcgccggaatccacttgcggcggcgtgattttgacgctaaattgaacgtcttgctgataatttcagcacttgagataaaaacgcaaaaaaaacttttttggggggttgcagagggaaagatttctcgtataatgcgcctcccgtaacgacgcagaaatgcgaaaattacgaaagcaaaattaagtagtacgcgggaatagctcagttggtagagcacgaccttgccaaggtcggggtcgcgagttcgagtctcgtttcccgctccaaaatttgaaaagtgctgcaaagcacagaccacccaagcgggaatagctcagttggtagagcacgaccttgccaaggtcggggtcgcgagttcgagtctcgtttcccgctccaaaatttgaaagtgctgtaaggcacagaccacccaagcgggaatagctcagttggtagagcacgaccttgccaaggtcggggtcgcgagttcgagtctcgtttcccgctccaaattcttctctcaataaaatatccacagcgacgcgatgcgttattgctggtttttgttgtctctgacaaactcttgtaaacagagttatccacagcctcaggctgtaatcttaatttcaaagaaacttcgcacggtgaatagtatttttttaacctattgatagataagttaaaaattaagattccgttttgtcgagtcgatcacttgacgattttattcgtcttgaattgcaatgcgtttttatttttattcacaagctgtggatgaatcaggcgtcacgcggtaaccctttttcaatcacccgaaccagacgctgttttttcggcaattgcacttcgactatgcacgcatttcgtctctctatttgctgcgcaatcgcccacgctatgtgctcatcgagaagtgggtgctcacctttacgactttccagcgctgtcaaaatcgtttcatcccaaggggcattgcctaatgctacggcgatattacgcagccaacgcaggtgaccaatacgacgaatcgcgcttccttccgtgacttttaaaaacttctcttcgctccaggcgaataactcaatgagttccggtgcgtgtagcggcttacgcgggctgaaatcctcttctgtggtgagttgactatagcgattccacgggcagataagctggcagtcatcgcaaccgtaaatacggtttcccattaacggtcgcaactcttccgggatcgccccttcaagttcgatggtgagataagagatacagcggcgagcatcgacggtatatggctcgacgatggcaccggtcgggcaaatcgtcatacaggccacgcatttgccgcatccttcctcgactggttgatccacgggcagcggaatatcgaccagcaattcgcctaaaaagaagaagctaccggcctcgcgattgaggataagactgtgcttacctgtccagccgagcccagctttttcagctaacgggcgctcgagaataggcgcagaatcgacaaacggtctaaaattcaggctaacacaatgttgctgaatcatctcgcccagctttttgagtcggttgcgcagaagtttgtgatagtcacggcccagcgcataacggctaacatagccgagtttggggtttttcagcgtgctggcaaatgcggcgttagcaggaaggtaattcatccgcacgctgatcacgcgcagcgtaccgggcaataactcatgagggcgagcgcgcagcataccgtgacgtgccatccagtccatttcgccgtggtattgtttgtccagccatgcttgcagtttgggctcggactcgctgagatcggtatcggtaatacctacctgctgaaagcccagttccagcccccactgtttaattttttgcgctaactgattgagatcgaggggctcactcatgacggaccatacaatgaagaaaaaccccgtaagtataccacacaccgtctggtacgccgacgatatccgccgcggagaacgcgaggcggcagatgtgctggggctcacactctatgagctgatgcttcgcgctggcgaggccgcattccaggtgtgtcgtagcgcgtatcctgacgcccgccactggctggtgctgtgcggtcatggtaataacggcggcgatggctacgtggtcgcgcgactggccaaagcggtcggcattgaggtcacgttgttggcccaggagagcgacaaaccgttgccggaagaggccgcgctggcacgcgaagcatggttaaacgcgggtggcgagatccatgctagcaatattgtctggcccgaaagcgtagatctgattgttgatgcgctgctcggtaccggtttgcggcaagcgccccgcgaatccattagccagttaatcgaccacgctaattcccatcctgcgccgattgtggcggttgatatcccttccggcctgctggctgaaactggcgctacgccaggcgcggtgatcaacgccgatcacaccatcacttttattgcgctgaaaccaggcttgctcactggaaaagcgcgggatgttaccggacaactgcattttgacagtctggggctggatagttggctggcaggtcaggagacgaaaattcagcggtttagtgcagaacaactttctcactggctaaaaccgcgtcgcccgactagccataaaggcgatcacgggcggctggtaattatcggtggcgatcacggcacggcgggggctattcgtatgacgggggaagcggcgctgcgtgctggtgctggtttagtccgagtactgacccgcagtgaaaacattgcgccgctgctgactgcacgaccggaattgatggtgcatgaactgacgatggactctcttaccgaaagcctggaatgggccgatgtggtggtgattggtcccggtctgggccagcaagagtgggggaaaaaagcactgcaaaaagttgagaattttcgcaaaccgatgttgtgggatgccgatgcattgaacctgctggcaatcaatcccgataagcgtcacaatcgcgtgatcacgccgcatcctggcgaggccgcacggttgttaggctgttccgtcgctgaaattgaaagtgaccgcttacattgcgccaaacgtctggtacaacgttatggcggcgtagcggtgctgaaaggtgccggaaccgtggtcgccgcccatcctgacgctttaggcattattgatgccggaaatgcaggcatggcgagcggcggcatgggcgatgtgctctctggtattattggcgcattgcttgggcaaaaactgagcccgtatgatgcagcctgtgcaggctgtgtcgcgcacggtgcggcagctgacgtactggcggcgcgttttggaacgcgcgggatgctggcaaccgatctcttttccacgctacagcgtattgttaacccggaagtgactgataaaaaccatgatgaaagcagtaattccgctccctgaataaggaagtgactgataaaaaccatgatgaatcgagtaattccgctccctgatgagcaggcaacattagacctgggcgagcgggtagcgaaagcctgcgatggcgcaaccgtaatctatctgtatggcgatttaggcgcaggtaaaaccacctttagccggggctttttacaggctctgggtcatcagggtaatgtcaaaagccccacttatacgctggtcgaaccctatacgctcgacaacttaatggtctatcactttgatttgtaccgccttgccgatcccgaggagctggagtttatggggatccgcgattattttgccaacgatgccatctgcctggtggagtggccacaacaaggtacaggtgttcttcctgacccggatgtcgaaatacacattgattatcaggcacaaggccgtgaggcgcgcgtgagtgcggtttcctctgcgggtgaattgttgctggcgcgtttagccggttaacctttgaaaggtggcgggatgatgtatcgcatcagaaattggttggtagcgacgctgctgctgctgtgcacgccggtgggtgccgcgacgctctctgatattcaggtttctaacggtaatcaacaggcgcggataacgttgagttttattggcgatcctgattatgcgtttagccatcaaagcaaacgcaccgtggcgctcgatatcaaacaaacgggcgtgattcagggactgccgttgttgttcagcggcaataatctggtgaaggcgattcgctctggaacgcctaaagatgcacaaacgctacggctggtggtcgatcttaccgaaaacggtaaaaccgaagcggtgaagcggcagaatggcagcaattacactgtcgtctttacgattaacgccgatgtgccgccaccgcctcctccgccgcccgtggttgcgaaacgcgttgaaacgcctgcggttgtcgcaccgcgcgtcagcgaaccggcgcgcaatccgtttaaaacggaaagtaaccgcactacgggtgttatcagcagtaatacggtaacgcgtccggcagcgcgcgcgacggctaacactggcgataaaattatcatcgctattgatgccggacacggcggtcaggaccctggcgctatcggccccggtggtacgcgggagaaaaatgtcaccatcgccatcgcgcgtaaattgcgtactttgctcaatgacgatccgatgtttaaaggcgttttaacccgtgacggggattactttatcagcgtgatggggcgcagtgatgtggcacgtaagcaaaacgccaatttcctcgtgagcattcacgctgatgccgcaccgaaccgcagtgcgactggcgcttccgtatgggtgctctctaaccgtcgcgccaacagtgaaatggccagctggctggagcagcacgagaaacagagcgagctgctgggtggggcgggtgatgtgctggcgaacagtcagtctgacccctatttaagccaggcggtgctggatttacagttcggtcattcccagcgggtagggtatgatgtagcgaccagtatgatcagtcagttgcaacgcattggcgaaatacataaacgtcgaccagaacacgccagccttggcgttctgcgcagcccggatatcccaagtgtactggtcgaaaccggttttatcagcaacaacagcgaagaacgtttgctggcgagcgacgattaccaacaacagctggcagaagccatttacaaaggcctgcgcaattacttccttgcgcatccgatgcaatctgcgccgcagggtgcaacggcacaaactgccagtacggtgacgacgccagatcgcacgctgccaaactaaggacgattgatgccaattcaggtcttaccgccacaactggcgaaccagattgccgcaggtgaggtggtcgagcgacctgcgagcgtagtcaaagaactagtggaaaacagcctcgatgcaggtgcgacgcgtatcgatattgatatcgaacgcggtggggcgaaacttatccgcattcgtgataacggctgcggtatcaaaaaagatgagctggcgctggcgctggctcgtcatgccaccagtaaaatcgcctctctggacgatctcgaagccattatcagcctgggctttcgcggtgaggcgctggcgagtatcagtagcgtttcccgcctgacgctcactagtcgcaccgcagaacagcaggaagcctggcaggcctatgccgaagggcgcgatatgaacgtgacggtaaaaccggcggcgcatcctgtggggacgacgctggaggtgctggatctgttctacaacaccccggcgcggcgcaaattcctgcgcaccgagaaaaccgaatttaaccacattgatgagatcatccgccgcattgcgctggcgcgtttcgacgtcacgatcaacctgagccataacggtaaaattgtgcgtcagtaccgcgcagtgccggaaggcgggcaaaaagaacggcgcttaggcgcgatttgcggcaccgcttttcttgaacaagcgctggcgattgaatggcaacacggcgatctcacgctacgcggctgggtggccgatccaaatcacaccacgcccgcactggcagaaattcagtattgctacgtgaacggtcgcatgatgcgcgatcgcctgatcaatcacgcgatccgccaggcctgcgaagacaaactgggggccgatcagcaaccggcatttgtgttgtatctggagatcgacccacatcaggtggacgtcaacgtgcaccccgccaaacacgaagtgcgtttccatcagagccgtctggtgcatgattttatctatcagggcgtgctgagcgtgctacaacagcaactggaaacgccgctaccgctggacgatgaaccccaacctgcaccgcgttccattccggaaaaccgcgtggcggcggggcgcaatcactttgcagaaccggcagctcgtgagccggtagctccgcgctacactcctgcgccagcaagtggcagtcgtccggctgccccctggccgaatgcgcagccaggctaccagaaacagcaaggtgaagtgtatcgccagcttttgcaaacgcccgcgccgatgcaaaaattaaaagcgccggaaccgcaggaacctgcacttgcggcgaacagtcagagttttggtcgggtactgactatcgtccattccgactgtgcgttgctggagcgcgacggcaacattagtcttttatccttgccagtggcagaacgttggctgcgtcaggcacaattgacgccgggtgaagcgcccgtttgcgcccagccgctgctgattccgttgcggctaaaagtttctgccgaagaaaaaagcgcattagaaaaagcgcagtctgccctggcggaattgggtattgatttccagagtgatgcacagcatgtgaccatcagggcagtgcctttacccttacgccaacaaaatttacaaatcttgattcctgaactgataggctacctggcgaagcagtccgtattcgaacctggcaatattgcgcagtggattgcacgaaatctgatgagcgaacatgcgcagtggagtatggcacaggccataaccctgctggcggacgtggaacggttatgtccgcaacttgtgaaaacgccgccgggtggtctgttacaatctgttgatttacatccggcgataaaagccctgaaagatgagtgatatcagtaaggcgagcctgcctaaggcgatttttttgatggggccgacggcctccggtaaaacggcgttagccattgagctgcgtaaaattttaccagtagagttgataagcgttgattctgcccttatttacaaagggatggatatcgggacggcgaagccgaacgctgaagagttactcgccgcgccgcaccgattgctggatattcgcgatccgagccaggcttacagcgctgctgattttcgccgcgatgcgctggcggaaatggccgatatcaccgcggcggggcggatcccactgttagtgggcggtacgatgttgtatttcaaggcattgctggaagggttgagcccgctaccgagcgcagacccggaagtacgggccagaattgagcaacaggcggcagagcaaggttgggagagtttgcatcgtcaacttcaggaggtagatccggttgcggcagcaaggattcatccaaatgatccacaaaggctttcccgggcactggaagtttttttcattagcggtaaaactttaacggaactgacgcaaacgagtggagacgctctaccgtatcaggtgcatcagttcgccatcgccccggcgagccgtgaactgctccatcaacgcattgagcagcgttttcatcagatgttggctagtggttttgaagcagaagtccgggcgctttttgcccgaggagatttgcatacggacttgccttccattcgttgcgtgggttatcgccagatgtggtcttaccttgaaggcgaaatcagttacgatgaaatggtttatcgaggtgtttgcgccacgagacagttggcgaagcggcagataacctggctgcgtggttgggaaggggttcactggcttgacagtgaaaaaccagaacaggcgcgtgacgaagtattacaggttgttggtgctatcgcaggctgaatgtgtacaattgagacgtatcgtgcgcaattttttcagaatcgaaaggttcaaagtacaaataagcatataaggaaaagagagaatggctaaggggcaatctttacaagatccgttcctgaacgcactgcgtcgggaacgtgttccagtttctatttatttggtgaatggtattaagctgcaagggcaaatcgagtcttttgatcagttcgtgatcctgttgaaaaacacggtcagccagatggtttacaagcacgcgatttctactgttgtcccgtctcgcccggtttctcatcacagtaacaacgccggtggcggtaccagcagtaactaccatcatggtagcagcgcgcagaatacttccgcgcaacaggacagcgaagaaaccgaataaggtttcgggctgtttttttacacggggagccagcgatcctgcgttccccgctgatctatttagagggttatacgcttgtttgaccgttatgatgctggtgagcaggcggtactggtacacatctattttacgcaagacaaagatatggaagacctccaggagtttgaatctctggtctcttccgccggtgtcgaagcattgcaggtgattaccggtagccgtaaagcgccgcacccaaagtattttgtaggtgaaggtaaagcagttgaaattgcggaagctgtcaaagcgacgggtgctagcgtcgttctttttgaccatgccctgagcccggcgcaagagcgtaacctggagcgtttgtgcgagtgtcgtgttatcgaccgcaccggccttattttagatattttcgcccaacgtgcgcgtacccatgagggtaagttgcaggttgagctggcgcagctgcgccatctggctacgcgcctggtgcgtggctggacccaccttgaaagacagaaaggcgggataggtttgcgtggtccgggtgaaacccagctcgaaaccgaccgtcgtttgttgcgtaatcgcatcgtgcagatacagagccgcctggaaagagttgaaaagcagcgtgagcaggggcggcaaagccgtatcaaagccgacgttcctactgttagcctggtgggatataccaacgccggtaaatctacccttttcaatcgcatcaccgaagcgcgggtctacgcggcagaccagttgtttgccaccctcgacccgacgttgcggcgtattgacgttgcagatgtcggtgaaaccgtacttgcagataccgtagggtttattcgccacctgccgcacgatctggtggcggcatttaaagccacgttacaagagacgcggcaagccacattactgctgcacgtcattgatgcggcggatgtgcgtgtacaagaaaacatcgaagcggtgaatacggttcttgaagagatcgacgctcacgagatcccaaccctgctggtgatgaacaagatcgatatgctggaagatttcgaaccgcgtattgatcgggacgaagagaacaaaccgaaccgtgtctggctttccgcacagaccggagcggggataccacagctttttcaggctttgacggagcggctttccggcgaggtggcgcagcatacattgcgtctgccaccgcaggaagggcgtctgagaagtcgtttttatcagcttcaggcaatagaaaaagagtggatggaggaggacggcagcgtaagtctgcaagttcgtatgccgatcgttgactggcgtcgcctctgtaaacaagaaccggcgttgatcgattacctgatctaacggcgtagcgtctgaagcgtggagtcatatcctctggcgtcgaaagacaacagggatcaccgcataacaaatatggagcacaaacatggcgtggaatcagcccggtaataacggacaagaccgcgacccgtggggaagcagcaaacctggcggcaactctgagggaaatggaaacaaaggcggtcgcgatcaagggccacctgatttagatgatatcttccgcaaactgagcaaaaagctcggtggtctgggcggcggtaaaggcaccggatctggcggtggcagtagtagccaaggcccgcgcccgcagcttggcggtcgtgtcgttaccatcgcagcggcagcgattgtcattatctgggcggccagtggtttctataccattaaagaagccgaacgcggcgtggtaacacgctttggtaaattcagccatctggttgagccgggtctgaactggaaaccgacgtttatcgacgaagtcaaaccggtgaacgtggaagccgtgcgtgaactggccgcttctggtgtgatgctgacgagcgacgagaacgtagtgcgcgttgagatgaacgtgcagtaccgcgtcaccaatccggaaaaatatctgtatagcgtgaccagcccggatgacagcctgcgtcaggctaccgacagcgccctgcgtggagttatcggtaaatacaccatggaccgcattctgacggaaggtcgtaccgtgattcgtagcgatactcagcgcgaactggaagagacgattcgtccgtatgacatgggtatcacgctgctggacgtcaacttccaggctgctcgtccgccggaagaagtaaaagcggcgtttgacgatgcgattgccgcgcgtgaaaacgaacagcaatacattcgtgaagcagaagcgtataccaacgaagttcagccgcgtgcgaacggtcaggcgcaacgtatcctcgaagaggcgcgtgcgtacaaggcccagaccatcctggaagctcagggtgaagtggcgcgctttgctaaacttctgccggaatataaagccgcgccggaaattactcgcgagcgtctgtatatcgagacgatggaaaaagtgttgggtaacacccgcaaagtgctggttaacgataaaggtggcaacctgatggttctgccgttagaccagatgctgaaaggtggtaacgcccctgcggcgaagagcgataacggtgccagcaatctgctgcgtctgccgccagcctcttcctccacaaccagtggagcaagcaacacgagctccaccagtcagggcgatattatggaccaacgccgcgccaacgcgcagcgtaacgactaccagcgtcagggggaataacgatgcgtaagagtgttatcgcgattatcatcatcgtgctggtagtgctttacatgtctgtctttgtcgtcaaagaaggtgagcgcggtattacgctgcgttttggtaaggtactgcgtgacgatgacaacaaacctctggtttatgagccgggtctgcatttcaagataccgttcattgaaacggtgaaaatgctcgacgcacgtattcagaccatggacaaccaggccgaccgctttgtgaccaaagagaagaaagacctgatcgtcgactcttacatcaaatggcgcatcagcgatttcagccgttactacctggcaacgggtggtggcgacattagccaagcggaagtgctgttgaaacgtaagttctctgaccgtctgcgttctgaaattggtcgcctggacgtgaaagatatcgtcaccgattcccgtggtcgtctgaccctcgaagtacgtgacgcgctgaactccggttctgcgggtacagaagatgaagttactaccccggcggcagataacgccattgccgaagcggcagagcgcgtaacggctgagacgaagggcaaagttccggtcatcaacccgaacagtatggcggcgctgggtattgaagttgtcgatgtgcgtatcaagcagatcaacctgccgaccgaagtgtctgaagcgatctacaaccgtatgcgcgccgagcgtgaagcggtagcgcgtcgtcaccgtagtcaaggtcaggaagaagcggaaaaactgcgcgcgactgccgactatgaagtgaccagaacgctggcagaagctgagcgtcagggccgcatcatgcgtggtgaaggcgatgccgaagcagccaaactgtttgctgatgcattcagtaaagatccggacttctacgcattcatccgtagcctgcgtgcttatgagaacagcttctctggcaatcaggacgtgatggtcatgagcccggatagcgatttcttccgctacatgaagacgccgacttccgcaacgcgttaatataacgactgcggtacaggtcaataaagccaccgcatcctcagggatgtcggtggttttctttttctataaggataatgaatgaatagcacaatctggctggcgcttgccctggttttggtactggaaggtttagggccgatgctttacccgaaggcatggaagaagatgatctctgcgatgaccaatttgcccgataatattttacgtcgttttggcggtggacttgtggttgcgggcgttgtggtctactacatgttgaggaaaacgattggctgaacaaaaaacagactgatcgaggtcatttttgagtgcaaaaagtgctgtaactctgaaaaagcgatggtagaatccatttttaagcaaacggtgattttgaaaaatgggtaacaacgtcgtcgtactgggcacccaatggggtgacgaaggtaaaggtaagatcgtcgatcttctgactgaacgggctaaatatgttgtacgctaccagggcggtcacaacgcaggccatactctcgtaatcaacggtgaaaaaaccgttctccatcttattccaagtggtattctccgcgagaatgtaaccagcatcatcggtaacggtgttgtgctgtctccggccgcgctgatgaaagagatgaaagaactggaagaccgtggcatccccgttcgtgagcgtctgctgctgtctgaagcatgtccgctgatccttgattatcacgttgcgctggataacgcgcgtgagaaagcgcgtggcgcgaaagcgatcggcaccaccggtcgtggtatcgggcctgcttatgaagataaagtagcacgtcgcggtctgcgtgttggcgaccttttcgacaaagaaaccttcgctgaaaaactgaaagaagtgatggaatatcacaacttccagttggttaactactacaaagctgaagcggttgattaccagaaagttctggatgatacgatggctgttgccgacatcctgacttctatggtggttgacgtttctgacctgctcgaccaggcgcgtcagcgtggcgatttcgtcatgtttgaaggtgcgcagggtacgctgctggatatcgaccacggtacttatccgtacgtaacttcttccaacaccactgctggtggcgtggcgaccggttccggcctgggcccgcgttatgttgattacgttctgggtatcctcaaagcttactccactcgtgtaggtgcaggtccgttcccgaccgaactgtttgatgaaactggcgagttcctctgcaagcagggtaacgaattcggcgcaactacggggcgtcgtcgtcgtaccggctggctggacaccgttgccgttcgtcgtgcggtacagctgaactccctgtctggcttctgcctgactaaactggacgttctggatggcctgaaagaggttaaactctgcgtggcttaccgtatgccggatggtcgcgaagtgactaccactccgctggcagctgacgactggaaaggtgtagagccgatttacgaaaccatgccgggctggtctgaatccaccttcggcgtgaaagatcgtagcggcctgccgcaggcggcgctgaactatatcaagcgtattgaagagctgactggtgtgccgatcgatatcatctctaccggtccggatcgtactgaaaccatgattctgcgcgacccgttcgacgcgtaattctggtacgcctggcagatattttgcctgccgggcgaacagtgtgatacattgctgtgtcgggtaagccattacgctatccgacacagtgttaaatcctcgcttttttccttccccgaactgaaataaattagcgacacagcttgtggctggtttatcatcaatataaatgtattttttcccgatttcccttttgaggttgatgtgcagttaacgagtttcactgattacggattacgtgcgctgatctacatggcgagtttgccagaagggcggatgaccagtatttctgaagtgactgacgtctacggcgtctcccgtaatcatatggtcaaaataatcaatcaacttagtcgtgccggctacgtgactgctgttcgtggaaaaaatggcggcattcgcctgggtaaaccggcgagtgcgatacgtattggtgatgtggtgcgcgagctggagcccttaagcctggtgaattgcagcagtgagttttgccacattacacctgcctgtaggttgaaacaggcactttctaaggccgtgcaaagttttcttacggaactggataactacacgcttgccgatttggttgaagagaatcaaccgctttataaattattgctggtggagtgacgaaaatcttcatcagagatgacaacggaggaaccgagatgagtcaagatcctttccaggaacgcgaagctgaaaaatacgcgaatcccatccctagtcgggaatttatcctcgaacatttaaccaaacgtgaaaaaccggccagccgtgatgagctggcggtagaactgcacattgaaggcgaagagcagcttgaaggcctgcgtcgccgcctgcgcgcgatggagcgcgatggtcaactggtcttcactcgtcgtcagtgctatgcgctgccggaacgcctcgacctggtgaaaggtaccgttattggccaccgtgatggctacggctttctgcgggttgaagggcgtaaagatgatttgtatctctccagcgagcagatgaaaacctgcattcatggcgatcaggtgctggctcagccgctgggtgctgaccgtaaaggtcgtcgtgaagcgcgtattgtccgcgtactggtgccaaaaaccagccagattgttggtcgctactttaccgaagcgggcgtcggctttgtggttcctgacgacagccgtctgagcttcgatatcttaatcccgcccgatcagatcatgggcgcgcggatgggctttgtggtcgtagtcgaactgactcagcgtccgactcgccgcaccaaagcggtgggtaaaatcgtcgaagtgctgggcgacaatatgggcaccggcatggcggttgatatcgctctgcgtacccatgaaattccgtacatctggccgcaggctgttgagcaacaggttgccgggctgaaagaagaagtgccggaagaagcaaaagcgggccgtgttgatctgcgcgatttaccgctggtcaccattgatggcgaagacgcccgtgactttgacgatgcagtttactgcgagaaaaaacgcggcggcggctggcgtttatgggtcgcgattgccgacgtcagctactatgtgcgtccgagtacgccgctggacagagaagcgcgtaaccgtggcacgagcgtgtacttccctagccaggttatcccgatgctgccggaagtgctctctaacggcctgtgtagcctcaacccgcaggtagaccgcctgtgtatggtgtgcgagatgacggttagcagcaaaggccgcctgacgggctacaaattctacgaagcggtgatgagctctcacgcgcgtctgacctacaccaaagtctggcatattctgcagggcgatcaggatctgcgcgagcagtacgccccgctggttaagcatctcgaagagttgcataacctctataaagtgctggataaagcccgtgaagaacgcggtgggatcagttttgagagcgaagaagcgaagttcattttcaacgctgaacgccgtattgaacgtatcgaacagacccagcgtaacgacgcgcacaaattaattgaagagtgcatgattctggcgaatatcagcgcggcgcgtttcgttgagaaagcgaaagaaccggcactgttccgtattcacgacaagccgagcaccgaagcgattacctctttccgtagtgtgctggcggagctggggctggaactgccgggcggtaacaagccggaaccgcgtgactacgcggagctgctggagagcgttgccgatcgtcctgatgcagaaatgctgcaaaccatgctgctgcgcagcatgaaacaggcgatttacgatccagaaaaccgtggtcactttggcctggcattgcagtcctatgcgcactttactagcccgattcgtcgttatccagacctgacgctgcaccgcgccattaaatatctgctggcgaaagagcaggggcatcagggcaacaccactgaaaccggcggctaccattatagcatggaagagatgctgcaactgggtcagcactgtagcatggcggaacgtcgtgccgacgaagcaacgcgcgatgtggctgactggctgaagtgtgacttcatgctcgaccaggtaggtaacgtctttaaaggcgtaatttccagcgtcactggctttggcttcttcgtccgtctggacgacttgttcattgatggtctggtccatgtctctagcctggacaatgactactatcgctttgaccaggtagggcaacgcctgatgggggaatccagcggccagacttatcgcctgggcgatcgcgtggaagttcgcgtcgaagcggttaatatggacgagcgcaaaatcgactttagcctgatctccagcgaacgcgcaccgcgcaacgtcggtaaaacggcgcgcgagaaagcgaaaaaaggcgatgcaggtaaaaaaggcggcaagcgtcgtcaggtcggtaaaaaggtaaactttgagccagacagcgccttccgcggtgagaaaaaaacgaagccgaaagcggcgaagaaagacgcgagaaaagcgaaaaagccaagcgcgaaaacgcagaaaatagctgcagcgaccaaagcgaagcgtgcggcgaagaaaaaagtggcagagtgatcaataccctctttaaaagaagagggttagattgctgacaaaatgcgctttgttcatgccggatgcggcgtgaacgccttatccggcctacataatcacgcaaattcaatatattgcagagatcatgtaggccggataaacgtagtgcatcaggcaaaacgtaaacaacgagtacattaatgagcgaaatgatttacggcatccacgcagtgcaggccctgctggagcgcgcccctgaacgttttcaggaagtctttattttaaaaggccgtgaagataaacgtctgttaccgctgattcacgcccttgagtctcagggcgtggttatccagttggcaaaccgccaatatctcgacgagaaaagcgacggtgccgtgcatcagggcattatcgcccgcgtgaagccaggacgtcagtatcaggaaaacgatctgccggatctgatcgctagcctcgatcaaccgttcctgctgatcctcgacggcgtaaccgatccgcacaacctcggcgcgtgcctgcgtagtgcggacgccgcaggcgttcatgcggtgattgtgccgaaagatcgctccgcacagctcaacgctacggcgaaaaaagtagcctgcggcgcggcagaaagcgttccgctgattcgggtgactaaccttgcgcgcaccatgcgtatgttgcaggaagagaatatctggatcgtcggtacggcaggcgaggcggatcatacactctatcagagcaaaatgaccggacgcctggcgctggtgatgggtgcggaaggtgaaggtatgcgtcgcctgactcgtgaacattgcgatgagttgatcagcatcccgatggctggaagcgtttcttccctgaacgttagcgttgcgaccggaatttgcttatttgaagcggtgcgccagcgcagctaatttctcagaattatgaaaagccatccagatttggatggtttttttttgtctatagctggtaagataattacgtattgcaaatattcattttattaatatttaaacttaatctatatggaataatatatgacatggaatccgttggcgctagcgacggcgctgcaaactgtacctgaacaaaatattgatgtaacaaatagcgagaacgcattaattattaaaatgaatgattatggcgatttgcaaatcaatattctttttacttcccgccaaatgattatcgaaacctttatttgtccggtgagtagtatcagcaatccagatgaatttaataccttcttattaagaaatcagaagatgatgccgttgagtagcgtagggatctccagcgtacaacaggaagagtattacattgttttcggggcgttaagccttaaatcttctcttgaagatatcctgcttgagataaccagcctggtagataacgcattggatctggctgaaattacagaagaatatagtcactaattacaaggacgggtatttatgggaattttaaaaagtttatttacgctggggaaaagctttatctcccaggcggaagaatccattgaagaaacccagggcgtgcgcatgctggaacagcatattcgtgacgctaaagctgaactcgataaagccggaaaatctcgcgttgatctgctggcgcgggtgaaattaagtcacgataagctgaaagatttacgtgagcgcaaagccagtctggaagcccgtgcgctggaagcgttaagcaagaacgttaatccgagcttgattaacgaagttgctgaagaaatcgcgcgccttgagaatctcattaccgctgaagagcaagtgttgagcaatctggaagtctcccgtgatggcgtggaaaaagcagttacagcgacagcgcagcgtatcgctcagtttgagcagcaaatggaagtcgttaaagccactgaagccatgcagcgtgcacaacaggctgtaacaacctctaccgttggcgcatcttccagcgttagcacagcggcagaatccttaaaacgcctgcaaacgcgtcaggccgaacgtcaggctcgcctggatgctgccgcacagttggagaaagtcgcagacggtcgcgaccttgacgaaaagctggcggaagccggaattggcggtagcaataaaagtagcgcccaggatgtattagcaagactgcaacgccaacagggcgagtaatttttttgccagcctcgctaaaaggctggcaactattttaaggataaaatatgtctggttttttccagcgtctgtttggcaaggataataagccagctatcgctcgtggtccgctgggacttcatctcaatagtggctttacgctcgacacgttagcgtttcgtttgctggaagatgaattgctgattgcgctgccgggtgaggaatttacggtagccgccgtcagccacatcgatctgggcggcggtagtcagattttccgctactacactagtggcgatgagtttctgcaaatcaataccaccggcggcgaagatattgatgacattgatgatatcaagctctttgtctatgaagagagctacggtatcagtaaagagagtcactggcgcgaggcgatcaacgccaaagcgatgggagcaatgaccttaaactggcaggaaaaacgctggcagcgattttttaacagcgaagaaccgggaaatatcgaacccgtctacatgctggaaaaagtagaaaatcaaaaccatgccaaatgggaggtccataattttaccatgggctaccaacggcaagtaaccgaagatacttacgaatatttgctgctaaatggtgaggaatcttttaacgatctcggcgagccagagtggttatttagccgcgcgttgggtgtcgatatcccgctgacaagtcttcatattattggttaattacaaggacgtttacaatgcatatactggatagtcttcttgcctttagcgcctatttttttattggcgtggctatggtgattatttttctgtttatctattctaaaattacaccgcacaacgaatggcagttaatcaaaaacaataataccgcggcgagtctggcgttcagcggtacattgttgggttacgttatccccttatccagtgcggcaatcaatgcggtgagtattccagactatttcgcctggggcgggattgcactggtgattcagttactcgtttttgctggtgtcagactttatatgcccgcattaagcgaaaaaattattaatcacaataccgcagcaggaatgtttatgggaaccgccgcgctggctggcggtatttttaacgcagcttgtatgacatggtaatggacgatcatggccagaaaacgcaaaagtagaaataacagtaaaattggtcacggagcgattagtcgcattggtagaccgaataatccttttgaaccgtgccgcaatcgctacgcacaaaaatacttaacgttggcgctaatgggcggtgccgcttttttcgtattgaaaggttgtagcgatagtagcgatgtcgataacgacggcgacggaacgttttacgcgacagtgcaggattgtattgatgacggtaataatgccgacatttgcgcgcgtggctggaacaacgccaaaacggcattttatgccgatgttccgaagaatatgactcagcagaactgtcagtctaagtacgaaaattgctactacgacaatgttgaacagagttggatcccggtcgtttctggatttttgttaagccgggttattcgtaaagatcgcgatgagccgtttgtttataacagcggcggttcctcttttgctagccgcccagtctggcgcagcacttctggtgattactcctggcgctccggttctggcaaaaaagagtcttactctagcggcggctttaccaccaaaaaagcgtctaccgtttctcgcggcggctatggtcgttcttccagcgcccgtgggcattggggaggctaatcatgctgagacacaacgttcctgtgcgacgggatctggaccagatcgccgctgacaacggtttcgactttcatatcatcgacaatgaaatctattgggatgagagtcgggcttaccgttttactctgcgccagattgaagagcagatcgaaaaaccgactgcggaactgcatcagatgtgccttgaggtggtggatcgcgcggtaaaagatgaagagatcctgacgcaactggcgatcccgccgttgtactgggatgtgatcgctgaaagctggcgcgcccgcgatcctagcctgtatggacggatggattttgcctggtgtggcaatgcgccggtgaagctgctggagtacaacgccgatacgccaactagtttgtacgagagcgcttatttccagtggctgtggctggaggatgcccggcgcagcggcattattccgcgtgatgccgatcagtacaatgctattcaggaacgcctgattagtcgctttagcgagctttacagtcgggaaccgttttatttttgctgctgtcaggacaccgatgaagacaggagtaccgtgctgtacttgcaggactgcgcccagcaggcagggcaggagagccggtttatctacattgaagatctcggtttgggcgtcggcggcgtactgaccgatcttgatgataatgtcatccagcgtgcatttaagctgtatccgctggagtggatgatgcgtgacgataacggtccgctgctgcgcaagcgtcgcgagcaatgggtggagccgttatggaaaagtatcttgagtaataaagggctaatgccgctgctttggcgcttcttccctggtcatcctaatcttcttgcgtcctggttcgatggcgagaaaccgcagattgccgctggcgaaagctatgtgcgtaaaccaatctatagccgcgaaggcggcaacgtcaccatttttgacggcaagaataacgttgttgaccacgctgatggtgattacgccgatgaaccgatgatctaccaggcgtttcaacctctgccgcggtttggcgatagctacacactcatcggtagctggattgtcgatgatgaagcgtgcggaatggggatccgtgaagataacacactgatcaccaaagacaccagtcgtttcgttccgcattacattgctggataagaatgttttagcaatctctttctgtcatgaatccatggcagtgaccatactaatggtgactgccattgatggagggagacacagtgcactggcaaactcacaccgtttttaatcaacctataccattaaataacagcaacttatacctgtctgatggcgcgctctgcgaagcggtaacgcgtgaaggtgctggctgggatagcgattttctagccagtattggtcagcagttaggaacggctgaatcccttgaactggggcggctggcgaatgtgaatccgcctgaattattgcgctacgatgcgcaaggacgccgtctggacgatgtgcgttttcaccccgcctggcacctgctgatgcaggcgctatgtaccaatcgggtgcacaatcttgcctgggaagaagacgctcgctccggcgcatttgtggcgcgcgcggcgcgttttatgttacatgcgcaggttgaggcagggagcttatgtccgataaccatgacctttgccgccacgccattgttgttacagatgttacccgcgccgtttcaggactggaccacgccgctattgagcgatcgctacgattctcacttattgccaggtgggcaaaaacgcggtttgttgattggcatgggaatgacggaaaagcagggcggttccgatgttatgagcaacaccacccgtgcagagcgtctggaagatggctcttatcggctggtggggcataaatggtttttcagcgttccgcaaagcgatgcgcatctggtgctggcgcagaccgcgggtggtctgtcctgcttttttgtgccgcgctttttgcctgacgggcaacgcaacgcgattcgcctcgagcggctgaaagataagctgggtaatcgctctaacgccagttgcgaagtggagtttcaggatgccattggttggttgttggggctggaaggggaaggaattcgtctgatcctgaaaatgggtgggatgacgcgttttgattgcgccctgggtagccatgccatgatgcgccgtgcatttagcctggcgatttatcatgcacatcaacgccatgtttttggtaatccattgatccaacagccccttatgcgtcatgtcttaagtcgcatggcacttcagcttgaagggcaaacggcgttgctgtttcgtcttgcgcgagcgtgggaccggcgtgccgatgccaaagaagccctgtgggcgcgtttatttacgcctgcggcaaaatttgtgatctgcaaaagaggtatgccgtttgtggccgaagcgatggaggtgctgggcggcattggttattgcgaggagagtgagctgccgcggctttaccgggagatgccggtaaacagtatttgggaaggttccggcaatattatgtgcctggatgtgttgcgcgttctcaataagcaagcgggcgtatacgacttattgagcgaagcatttgtggaagtgaaagggcaggatcgctattttgatcgcgcggttcgtcgtttacagcagcagctgcgtaagccagctgaagaactggggcgagagattactcatcagctattcctgctgggctgcggtgcgcaaatgttgaaatatgcttctccgccaatggcgcaggcgtggtgtcaggtgatgttagatacgcgcggcggcgtacggttgagtgagcagatccagaatgatttattgctgcgggcgacggggggagtgtgtgtgtaagcgtatacgactgatgcgacgctggtttcgattaactaaatgaaatatgtgaaaattgtaggccggacaaggcgctcgcgccgcatccggcattgttcatttgctgtagatgacactcatgcatacagtatcgcctgtacgcgccagttatcaggctgctggtcttcgtacatggtaataatgcggtaccaactcgcaccttgttcatcggcctttaacgccacgatacgttccacgtcctgcggatccccactaatattgctaacactgatctgacctatttcattcaggcccgtcacgcagtcagcactggcgaattctgcagactgtgccgtggcgctcgcaggataagtcactaattgcaggctgggactggcaagtaattgtttcatcgtcagctccatttttcgtttccccacatgttgcagggcattccatcgcggtaataaacgcccaggcttccagccggtaatttattgtgcacaggtaaacgcatagggacgcaaagcaatgtaaagctgactatgtaagttgtctgatttatttacggtacaaaatggcttgactataccactgtcctgtcacgatggtttcgtccaccatgacgacaacgtaataatcagcttttgcagcgacagctttcgctttgatttctgctaatgcgtcatccggagaaccccgaaccatcgtgcttacgctacctattcgctgtaacccttgcgtctggtcgcggcgaatctcttgcggatggtccgttactggcggtgctggctgtggcgtaccttgcagtgcgctacaggcacttaacatcaacaccaataataaactggcaaaccggtaaataacgctattacgtttcctgctaaccatagtgtagtgccttattaatttaactttgggggaatgttcccgaattgttacctggtacgcgattttcgaatgaaaacgtgacgaaagcgtaacccacatctcaacattatgaactaataccgccagcagaaacttgtgctaaggatttcttcatgtcataccagacaaaaaggagagacagatgattgaaatagaaagtcgcgagctggcagatattcccgttcttcatgcttatcctgtcgggcaaaaagataccccgttaccgtgcgtaattttttatcacggctttactagttccagtctggtgtatagctattttgccgttgcgctggcgcaggctggtttgcgggtgatcatgccggatgcgcccgatcacggtagccgttttagtggtgacgcagcgcggcggttaaatcaattctggcaaatcttgctacaaagtatgcaggaattcactactttacgtgcggcaatagccgaagaaaactggctgcttgatgaccgtctggcagtcggtggcgcgagcatgggcgcgatgacggcactggggattaccgctcgccaccccacggtgagatgtaccgccagcatgatgggaagcggctattttacaagtctcgcccgtagtctgtttccaccgctgatacctgaaacggcagcacagcagaatgaattcaataacattgtcgcgccactggcagagtgggaagcgacaaaccacctggaacaacttagtgacagacctctactgctgtggcatggcctcgacgatgacgttgtgcctgccgacgaaagtctacgtttgcagcaggccttaagcgagacgggacgggataaactgctaacctgtagttggcagccaggcgtgcgtcaccgcattacgcctgaggcgttagatgctgccgtgacatttttccgccagcatctttaaacacgcagaatgctgaccccttgcgcttccagttgttgcaggatttccgggttagcatttttgccggtgataagcatatcgatttgatcggcacggctaaaaagcattcccgcgcgttcgccaatcttactgctatcaaccagtaccaccagtttccctaccacgctcagcatcttctgctctgccattgctgtcagcatatcggttttatacaacccttctgcggtcagcccttttccgctggtaaacatccagtgcccggcatagagactgttttcgctgccctgcgggcttaaagtgatggactgacttttgttgtactgtccgcccataatgatcacgctgtcatgttcttgatcgatcaggtaatttgccagcggtagataattagtgatgatttgcactggcttgccacacatttcccgcccaagcagaaacgcggtggagccgcagttgatgactacgctttcgcccggattaaccagctggctggccgctttagcgatacgtactttttcatcgtgattctgcgcctgatgcagattcatcggcgtccagcgcgggcgctgttgggtaatagcttctgcgccattgcgcacttttttcagtttgccgctttcgtcaagtttattgatatcgcgtcgcgcagtggcagggctaattcccagacgctcaacgactttctcaacggtcacaaagcccaattgtgcgagcatttccaggaggatttgatgtctttgtgcttcagtcatgagctattccgataaaatttgatttttttagatgatatttgaaatagccaggaaatactacgccggatagcgcgaacttctccacgctacccggtataaacgacagattacaggaaactcttgaacggcagatccggttcaatagtgaagcaatcatcgaaaccgcgcggatagtggtactcgaagttgtctttatccagcggccaggtaaatttgccacccacctgccagataaacggcttgaagccatacttcaggcgatcttttttcatctcccacagcacgcggatctcttgcggatcggcctggaagttactccagatatcgtggtggaacgggatcactactttcgcattcagcgcttcacccatacgcagcatatcggcgctggtcattttgtcggtgataccgcgcgggttttcgccgtagcttcctaacgccacgtcgatctgatgttcgttaccgtgcttcgcataatagttagagtagtgggagtcgccgctgtgatacagggagccgccaggcgttttgaacaggtagttcaccgcgcgatcgtccatgccatctggcagtacgccagccgctttttgatcggcaggcagggtgatcagtgcagtacggtcgaaagcatcaagcgcatgaatttcaatgtctttcacttttactacatcgcccggtttgaccacgatgcaacgctctttcggtacgccccagccaatccacaaatccacacaggttttcggtccgataaacggtacgtcatctgcacaattctgcatcacggcagcagcgacgttaacgtcgatatgatcgttgtgatcgtgagtcgccagtaccgcgtcgatctggcgaatcgcaaacggatcaagaacaaacggggtggtacgcaggtttggctgcagttttttcacgccagccatgcgctgcatctggtgaccctgtttcattaacgggttaccgtgactttgtttgccagtgccgcaccagaaatcaacgcaaacgttggtgccaccttcgcttttcaaccagatcccggtgcagccaagccaccacatcgcaaatgtgccaggagcgacctgttcttgttcaatttcttcattcaaccagctaccccactccgggaaagtgctcaggatccaggattcacgggtgatacttttcactttactcatcgccatttaccttcatgatagttcaattcgaatcaatatgtgattggttttgattaatcctgacactattttttcaggaaggcaatgaccattttttgactttttgccagggaagttgttgttgattttgagtatggaaagatttaatggaatgtgtaattcaattaactaaatgaatttaaatggataattgtttcgttgtgtgaatcccactctatccatgtggaattatttgcgggtcgcgtcacatttaatcataaataatcttgttgtgattacttttgaaaattagagtgagtgcacaacattccgggtgtgtggaatacccggttacctcttcttcaggagatcgttatggagatcctctacaacatctttaccgtgttttttaaccaggtcatgaccaatgccccgttgttgctgggtattgtgacctgtctgggctacatcctactgcgcaaaagtgtcagcgttattattaaaggcacgattaaaaccataattggtttcatgttgttgcaggcagggtccggcatcctcaccagcaccttcaaaccggtggtggcgaaaatgtccgaagtctacggcattaacggcgcaatttccgatacctacgctagtatgatggcaaccatcgaccgcatgggcgatgcctatagctgggtgggttacgccgtattgttagcgctggcgctgaacatctgttacgtgctgttgcgtcgcattaccggcattcgcacaatcatgttgaccggccacatcatgttccagcaggccgggttgattgccgttacgctgtttatcttcggctactccatgtggaccaccattatctgtaccgcgattctggttagcctctactggggcatcacttccaacatgatgtacaagccgactcaggaagtgacggatggctgtggtttctccatcggtcaccagcagcagtttgcaagttggattgcctataaagtcgcgccgttcctcggcaaaaaagaggagagcgttgaagacctcaaattgccgggctggctgaacattttccacgacaacatcgtctccacggcgattgtgatgaccatcttctttggtgccattctgctctccttcggtatcgacaccgtgcaggcgatggcaggcaaagtgcactggacggtgtacatcctgcaaactggtttctcctttgcggtggcgatcttcatcatcacgcagggtgtgcgcatgtttgtggcggaactctctgaagcatttaacggcatttcccagcgcctgatcccaggtgcggttctggcgattgactgtgcagctatctatagcttcgcgccgaacgccgtggtctggggctttatgtggggcaccatcggtcagctgattgcggttggcatcctggtcgcctgcggctccagcatcctgattattcctggctttatcccgatgttcttctctaacgccaccatcggcgtgttcgctaaccacttcggcggctggcgtgcggcgctgaagatttgtctggtgatggggatgatcgaaatctttggttgcgtctgggcggtgaaactcaccggtatgagtgcctggatgggcatggcggactggagcattctggcaccgccgatgatgcaaggcttcttctccatcggtatcgcctttatggccgtcatcattgtaattgcactggcttatatgttcttcgctggccgcgcgctgcgcgcagaagaagatgcagaaaaacaactggcagaacagtctgcttaataaggagttttgattatgaccgtacgtattctggctgtgtgtggcaacggacaaggcagttccatgatcatgaagatgaaagtggaccagtttttaacccaaagtaacattgaccatacggtaaacagctgcgcggttggcgagtacaaaagcgagttgagtggcgcggatatcatcatcgcttctacgcacattgcgggcgaaatcaccgtgaccggcaacaaatacgtggttggcgtgcgcaacatgctctctcctgccgactttggcccgaaactgctggaagtgatcaaagagcatttcccgcaggatgtgaagtaaggacgcgccatgaaattacgtgatagcctggcggaaaataaatccatccgcctgcaggctgaagcagagacatggcaggaagcggtgaaaatcggcgttgacctgctggtggcggcagatgtggtagagccgcgttactaccaggcgattctggatggcgttgaacagttcggtccttatttcgttatcgctccgggcctggcaatgccgcacgggcgtccggaagagggcgttaagaaaaccggtttctctctggtaacgctgaaaaagccgctggagttcaaccacgatgacaacgatccggtggatatcctcatcaccatggcggcggtcgatgccaatactcaccaggaagtgggcatcatgcagatcgtcaacctgtttgaagatgaagagaattttgaccgtttacgcgcctgccgtaccgagcaggaagtactggatctcattgaccgcaccaacgcggcagcttaagaaggaattgaacatgagtttaccgatgttgcaagtcgcgctggacaaccagactatggatagcgcctacgaaaccactcgcctgattgccgaagaagtcgacattatcgaagtgggcaccattctgtgcgtgggcgaaggcgtgcgtgcggttcgtgacctgaaagcgctctacccgcacaaaatcgtactggcagacgccaaaattgccgatgcaggcaaaatccttagccgtatgtgcttcgaagccaacgctgactgggtgacggtaatttgctgtgcggatatcaacaccgccaaaggcgcgctggacgtggcaaaagagtttaacggcgacgtgcagatcgaactgaccggttactggacctgggaacaggcgcaacagtggcgcgatgcaggcattgggcaggtggtttatcaccgcagccgtgacgcgcaggccgcaggcgtggcgtggggcgaagcggacatcaccgcgatcaaacgtctttccgatatgggcttcaaagtcaccgtcaccggaggcctggcgctggaagatctgccgctgttcaagggtattccgattcacgtctttatcgcgggccgtagtatccgtgatgccgcttctccggtggaagccgcacgtcagttcaaacgttccatcgctgaactgtggggctaaggagcggatatgttgtccaaacaaatcccgcttggcatctatgaaaaagcgctccccgccggggagtgctggctggaacgcctgcaactggcaaaaacgttaggcttcgattttgtcgaaatgagcgtagatgaaactgacgatcgcctgagccgcctcaactggagccgcgagcagcgtctggcgctggtcaatgcgattgttgaaaccggcgtgcgcgtgccgtccatgtgcctttctgctcatcgtcgtttcccgctgggcagtgaagatgacgcggtgcgggcgcaggggctggagattatgcgtaaagctatccagttcgcccaggatgtcggtattcgcgtgatccagctggcgggctatgacgtttactatcaggaagccaataacgaaacgcgtcgtcgtttccgtgacggcctgaaagagagcgttgagatggcaagccgcgcgcaggtgacgctggcgatggagatcatggattatccgttgatgagctccatcagcaaggcgctgggatacgcgcactatctcaacaatccgtggttccagctctacccggatatcggcaacctgagcgcgtgggacaacgatgtgcagatggagttgcaggccggaatcgggcatatcgtcgcggtacatgtgaaagacaccaaacctggcgtcttcaaaaacgtgccgtttggcgaaggtgtagtggatttcgaacgttgtttcgaaacgctcaaacagagtggctattgcgggccgtacctgattgagatgtggagcgaaacggcggaagacccggcggcagaagtggcgaaagcgcgtgattgggtgaaagcgcgcatggcgaaagcgggcatggtggaggcggcataatgcaaaagctaaaacagcaggtatttgaagccaacatggagctgccgcgctacgggctggtgacctttacctggggcaacgtcagcgctatcgaccgcgaacgcgggctggtggtgatcaagcccagcggcgttgcctacgaaaccatgaaagcggccgatatggtggtggttgatatgagcggcaaggtggtggaaggggagtatcgcccatcttccgacactgcgacgcatctcgaactctaccgtcgttacccgagccttggtggcattgtccatacccactccactcatgccaccgcatgggcgcaggcggggctggcgatcccggcgttaggcaccacgcacgccgactacttctttggcgacattccgtgtacgcgcgggttaagcgaagaagaggtgcagggcgagtatgaactgaacaccggcaaagtgattatcgaaacgctgggcaacgccgagccgctgcatacgccgggaattgtggtgtatcagcacgggccgttcgcctgggggaaagatgctcacgatgcggtgcataacgcggtggtgatggaagaagtggcgaaaatggcgtggattgcccgcggcattaacccacaactcaatcacatcgacagcttcctgatgaataaacacttcatgcgtaaacacggtcctaacgcttattacgggcagaagtaaaacacgcgctgcggaaatttccttcctcgggagataactggtctaattccgcagccgtttttcaaaaaaaagccccctgcgaagggggcaaagcaaactatggcaatgtttcgttggttatacctggtgttagcgataaatatccgcgctggcgtgcatattgccgttactccccggttcccgcatcagaattacgtggtagtacgttgcgccttgcgcatctgtttcttcatttaatgcctgacgtgcttcgctttcagtggcgaaattatgattgatataaatcacgcctaagctttgcacatcgtccatatttctggcctggtggttattaatttcaatggctgcccatgtatttgcacttagcaaaagcacagccagaagggctaaaacacgactgaacatagatacctcctcgacggctgactttgtgtgctctcctctgtgatgatcttctgatttaattttaatcaatgataaagaagttgatggtgaccatttctgatgcagttgttcaaaaaaacaccatgatgaagtgtgatgaacttcaaatcagcgtgttagaggttaattgcgaaaggggagatttatttcggctctgcccttgagtttagcgaggcatacaagtactataacgcgtcatttttcagccgacctttaacacgttccttgcctccccgggattcggctgacccagacaggaggctgaataatccgtaaggagcaattcgatgcgtcattacgaaatcgtttttatggtccatcctgaccagagcgaacaggttccgggcatgatcgagcgctacactgctgccatcactggtgcagaaggcaagatccaccgtctggaagactggggccgccgtcagctggcttacccgatcaacaaactgcacaaagcacactacgttctgatgaatgttgaagctccgcaggaagtgatcgatgagctggaaactaccttccgcttcaacgatgccgttatccgcagcatggttatgcgtaccaagcacgctgttaccgaagcatctccgatggttaaagcgaaagacgagcgccgtgagcgtcgcgatgatttcgcaaacgaaaccgctgatgatgctgaagctggggattctgaagagtaatttctgatgaccaaccgtctggtgttgtccggcaccgtgtgcagggctccccttcgaaaggtcagtccaagtggaattcctcactgccagttcgtgcttgagcatcgttctgtgcaggaggaagccggctttcaccggcaggcgtggtgtcaaatgcccgttattgttagcggacacgaaaaccaggccattactcacagtataacggtcggcagtcgcataaccgttcaggggttcattagttgccacaaggcaaagaacggactgagcaaaatggttttgcatgccgagcagattgaattgatagattctggagactaaccatatggcacgttatttccgtcgtcgcaagttctgccgtttcaccgcggaaggcgttcaagagatcgactataaagatatcgctacgctgaaaaactacatcaccgaaagcggtaagattgtcccaagccgtatcaccggtacccgtgcaaaataccagcgtcagctggctcgcgctatcaaacgcgctcgctacctgtccctgctgccgtacactgatcgccatcagtaatcggtcacggtccattaatacgactttgagaggataaggtaatgcaagttattctgcttgataaagtagcaaacctgggtagcctgggtgatcaggtaaacgttaaagcgggctatgctcgtaacttcctggtaccgcagggtaaagctgttccagctaccaagaaaaacattgaattcttcgaagctcgtcgcgctgaactggaagctaaactggctgaagttctggcagctgctaatgctcgcgctgagaaaatcaatgcactggaaactgttaccatcgcgtctaaagctggcgacgaaggtaaactgttcggttccatcggtactcgcgacatcgctgacgctgtaactgcagctggcgttgaagtggctaagagcgaagttcgtctgccgaacggcgttctgcgtaccactggcgaacacgaagtgagcttccaggttcacagcgaagtattcgcgaaagtgatcgtaaacgtagtagctgaataattcgttattcaacgagacgtaaaaacgccgaccattggtcggcgttttgctttctatttttcgtcaggtattagtttcgcaagtagatccattcaccattctcttgtgtccataagtcaggatggtttgctggcgttagatacatacgagcgcaactgatgtctcgctcctgcggcactcgctcgaaacccaaaccgctgtagattgcggcactactacttaaggaacgcagaccaattttcaaatcatggggtaaatcagaatacgcgtttagcaatgcagcaatgatgaatccgagggcattagaaacgcctgtaacagtgcgaagttggtcgatataaagatcgattgttggtagttcagaactccagcaattaggcatttgggcaggaagggttacaacgtatcctatcgtttggccggtatagtctggagtaccataaccaggtcccaaaaccacttcgtgtattgtgtatttactgttgggttcgaaggattcgacatcttgcaataaatatttcagttctgcggttaacctcgcacccgcgtaagctttattgtatttctgggcgtgaatattatctaatgtagcttcatggttccatccaaaagaattatcaccattcattgtgattccatcgtaagcattacacctcgtcgctaacttattgaatgcttgccagtcactgagatctagtttgtggatctcaacagtacgtctgccatcgcaattatgatctcttccacgattactaagtaatgtagcgcgtgcgtattgatgaaattttaattttactggtttgtcggtggagctaaaacgagataaatatgcaggaaaactataaatagtcgttggtaatgtcattgtaatgttacctgtttaatgtttttataaatatcgcagctgaatgttcacagaaaaaaatcgatattaataaaaataagtttgttttctgaagtggtgaaaatagcggatggtgaaagatattaatatcaaaaatcgctcattatggatataacgatgcacccggggagaaaatgacttccacgccttacaccgtacattcttgttgtgcggtatgtaattattctacgctgtcggtatcggtgtattcgttaatcagcaggttagccagccacaaaaagccattgagaaaattattgattttacatgggattattatattgctaatccttggtttttaaaaattgtgcatagtgaaaatcaaagtaaaggtgtgcattatgcaaaaagtcagcgtctcttagaaattaaccatgcgcacttgcagttaatggaatccttattggatgaagggaagaaacacaatatttttaagccagatatcgacccattgcaggtgaatattaatattgctgcgcttggcggatattatttgatcaaccagcatacgcttggcctggtttatcacatcagtatggttagtccccaggcactggaagccagacgtaaggtcatcaaagagacaatccttagctggcttttggttgaccctagttctaccgcgcacgaataattaccgcgcacgaataaaactgccatccggctggcgggtgaacaggacctgttgattattccccgtatcaatggttaagcccgtcaccacgccgctggcgttctggcggattttcaccatctgcccgttttgcaaattactcagcggcttacccgcgccttctacctgcgccattgcatagacatcggtagcgggcagtccgtggtcgcggaacagctgcgccatcgttttaccgggttcgacacggtaagagcgccattgattatcaattccgctatctggctggaatggttgcgtttgggtagtttgcggctgctcttctggctggccttcctgtataggttctggagcgaccggagccacctgatcaggaccattttgtggggtaactaattgcgcccgcagctgttcttctgtcggcggttgactttggctctgaatatctaactgcgcttcacgcgtcaccaccggcgcgttgggcgtatcatcagatggaagcagaaatccgaccaccaatacaatggcggcaataatgatcccccgacgatgcatcggcggcagcgggtccatgaagcgaaaattgtccggcgcgtgccagactttctccagggttggttttagttcaaagcgcccgggcatggtttcctcctgctccgcgtcttgttcctcaatcatagcctatgaataagctaacgctatgatgtccgtggtaaacccgcctttattatattcatacgggatattgctattgtttctttttccctgggatttgtcatcattcccgcgacaaagttttacccaaagaagtgtggctgatatgctgcccgctactttataccctaagaaaggaaatacgatgaccaccccaacttttgacaccatcgaagcgcaagcaagctacggcattggtttgcaggtagggcaacaactgagtgaatctggcctggaagggctgctgccagaagcactggttgcaggtattgccgatgcgctggaaggcaaacatccggctgttccggttgatgtggtgcatcgcgcgctgcgtgaaatccacgagcgcgccgatgccgttcgtcgtcagcgtttccaggcgatggctgctgaaggtgtgaaatacctggaagaaaacgccaaaaaagaaggtgtgaatagcaccgaatctggcctgcaattccgcgtgatcaaccagggtgaaggcgcaattccggcacgtaccgaccgcgttcgtgttcattacaccggtaaactgatcgacggcaccgtgtttgacagctccgttgctcgtggtgaacccgctgaattcccggttaatggcgtgatccctggctggattgaagcactgactctgatgccggtaggttctaaatgggaactgactatcccgcaggaactggcatatggcgagcgcggcgcaggcgcatccatccctccgttcagcaccctggtgtttgaagtcgaactgctggaaatcctctaagcagcgcattctgttcccctcgaacgagaggggagcaggcattcagcaataaacccttcagtttgccaaacggcgctattttgtgttgcaaagaccccgtaagcgtgtatttttgtgagctgtttcgcgttatcaccgtgatatgacactcactttaaacataaaattaacattagatctaaatcttagtattcatcccgcgtattgttacctaatatcgatgagtcccgatacagattcgtcgtatcatagactgactaaaggccgtagagcctgaacaacacagacaggtacaggaagaaaaaaacatggtagatcaggtaaaagtcgttgccgatgatcaggctccggctgaacagagcctacggcgcaatctcacaaaccgacatattcagcttattgccattggcggtgccattggtacggggttgtttatggggtctggcaaaacgattagccttgccgggccgagcatcattttcgtttatatgatcattggttttatgctctttttcgtgatgcgggcaatgggggaattgctgcttagcaatctggaatacaaatcttttagtgacttcgcttccgatttactcgggccgtgggcaggatatttcaccggctggacttactggttctgctgggttgtaaccggtatggcagacgtggtggcgatcacggcttatgctcagttctggttccccgatctctccgactgggtcgccagcctggcggtgatagtgctgctgctgacgctcaatctcgccaccgtgaaaatgttcggtgagatggagttctggtttgcgatgatcaaaatcgtcgccattgtgagcctgattgtcgtcggcctggtcatggtggcgatgcactttcagagtccgactggtgtggaagcgagtttcgcgcatttgtggaatgacggcggctggttcccgaaaggtttaagtggcttctttgccggattccagatagcggttttcgctttcgtggggattgagctggtaggtacaacagctgcggaaaccaaagatccagagaaaagtctgccacgcgcgattaactccattccgatccgtatcattatgttctacgtcttcgcgctgattgtgattatgtccgtgacgccgtggagtagcgtagtcccggagaaaagcccgtttgttgaactgttcgtgttggtagggctgcctgctgccgcaagcgtgatcaactttgtggtgctgacctctgcggcgtcttccgctaacagcggcgtcttctctaccagccgtatgctgtttggtctggcgcaggaaggtgtggcaccgaaagcgttcgctaaactttctaagcgcgcagtacccgcgaaagggctgacgttcagctgtatctgtctgctcggcggcgtggtgatgttgtatgtgaatcctagtgtgattggcgcgttcacgatgattacaaccgtttccgcgattctgtttatgttcgtctggacgattatcctttgcagctaccttgtgtatcgcaaacagcgtcctcatctacatgagaagagcatctacaagatgccgctcggcaagctgatgtgctgggtatgtatggcgttctttgtgttcgtggtcgtgttgctgacactggaagatgacactcgccaggcgctgctggttaccccgctgtggtttatcgcgctggggttgggctggctgtttattggtaagaagcgggctgctgaactgcggaaataaccgcattatcatgctggatggcgcaatgccatccagcttttagatcactcacccgccagcgcgcgtgggaacagtacattgttttccagactgatgtgatccatcaggtcatcaatcagttcattaatgccgttatacatcgctttccaggtggtgcaggcttctggcggcggtgtgacgttattggtggtgtgtttaatcacttccagcagttcgcccgcttcatcgtgctcgctttccattacgctgattggccccattgcctggctgcccatgccttgtttgatcatcgggaagaggatctgctcttctttcatcatgtggctggaaagctcttcatgcagcatggtcaggtattttgtcagcccttttggcacgctcggtttgtcggcgtgaacgcgctcgactttagtcgcttgcagaatcagctccggcagttgctcgcggtgacgatcgtggtagcgcacgatgatatggtcgatgatttctgccagcggggcgctacgccagtctttctcaatcggttgttcagcgagctttgccagttcagcttcaatgacctcaacatccagttctttacgtgccgccgcgcgcgccagcgtctgcttaccgccacagcagtaatccatatcatatttacgaaacagagcactagcgcgaggaatagagagcgccagttcacctaaaggttggtcgcgataagccatagctgatacctcattcttaataagataagatgtattttaaatgcatctttaaggcaaaagctataacccttacgtagcagaggcttatttaactcactgccagcgtgtcaactttcactgacagattcagttaaaggtttttctggttttgctctgaccgcgatgaccacgccaatcactaacagcgcgataccgctcagcgtcattagcggcggcatttgctggcggagtaaaaaggtgtacagcaaacctgccagcgtttcgaaaacaatcagcggcccgagaatcactgtcggtaatagctggctggcgacgttccagcagagtgcgccaacccaactgcaaagcacggctatcgcaaccatcagactaataaacaccagcggacgggggccaaagggtagggagaagtccggcgtttgcgtattcagccagtaacaagcgacgagatagccgataagactaaccggcagtgtgaccagcgcctgcgctgttgcccacatcatcggatgtttgtcgggattttcccgcagccagcgggcgttgcgcagggcataccacgcccagcagaccacggaaactaacgccagcacgatgccagaggtataacgtgcccagtcaaaatcggggagtccgtggtttaactcagcaatattcacacacgccaggccgatgccaatacaaatcagtgctggggcgagttttccccacgcgagtttgccgtcgcgctggctataaagcagattggcaaagacaggaatgaccaccggcagggtgccgataatcatcgtggaaacaggcgcgccagtacgttgaatggcactggcaaggcagaagtaatagatgaggttgcccatcatagtgagcatcaaggcggtaagccagtcgcgacgcgccaactgacgcagacgcacgcgtcccagccaggcaatgggcagcgcaattaaccctaacgccagataacgccccatgctctgcaacatcgccgggtattccggcacgatcaacggcccgacaaaaataagcccccacatcaaccctgctaacagggcgtacagcacgccgctaatcattactggcatccattgatctgtcagaagaaagttcaggaagcagacatgattgctcccggcatcccgtcattatcagagaggatgcgggaggatgccactttaattaattagttattaacattaaaaagatggcttacgctttcggctaacgttgtcgttgggtggccaatcaatttgctaagtgttttgctgtcatcaaacagaccgcctttgcttgcgccaacgtcagaatccgccagcatatccgccagtccgtcgggcagtccgacgcttttcagtgccgcggcgaaatcggcttcgctcagattttgataggtaacctgtttgccgctctgtttggtcagctctgccgctaactgtgtcaacgtccaggcactatcgcccgccagttcgtaaaccttgccttcgtgaccggcttcgctaatcacgcgtgccgcagctgccgcataatctgcccgcgttgcactggcgattttgccatcgcccgccgcaccgataaatacgccgtgttccagtgctgccggggcgctggcgaggtagttttcgctgtaccagccgttgcgcagcagggtgtaaacgatgccagaatcagccagcattttctccgtctcgatgtgctcatcggcgaggccgagcggggaggtatctgcatgtagcaggctggtataagcgataaatttcacgccagccgcctttgcggcattaataacattacgatgctgcggggcacgttgacccacttcgctggaagagatcagcagtagtttttccactccctgaagtgcagatgtcagtgcggcttcatcgccgtagtcagcctgacgcacggtaatgccttgtgctgccagggcttgggcttttgccggattacgaacgatagccactatttggctggcaggaaccgttttcatcaaggattcaataacatagtgaccaagttggccagtggcaccagtaatagcgatcatgggaagtctccatcgttttgtcttgtgtttaaatacgctaacacctaaacttacttttagtaagtacgtacaaaaaggtaagtatgaaatgagtcaggttagcctgagccaacaactgaaagagggtaatctctttgcggaacagtgcccgagccgcgaggtgttgaaacacgtcaccagccgttggggggtgttgattctggtggcgctacgcgaaggtactcatcgctttagcgacctgcggcgcaaaatcggtggggtgagtgaaaagatgcttgcgcagagcttacaggcgttagaacaggatggttttcttaaccgtatcgcgtatccggtggtgccgccgcatgtggaatatagcctcacgccgctgggcgagcaggtgagcgaaaaggttgctgcactggcggactggattgagttgaatttgcccgaggtgttggcggtgcgggatgaacgtgcggcataactgccggatgcgctgagcttatctggtctacggtgcatggcttgtagggcggataagatgcgccagcatcgcatccgccaataaatgccggatgcggttgatgatttataggccgaaaaagaagtgttttacttactcaaatccacctgataaatcgcaaacccgatatcatcggtcgcgactttattcatcggatactgccctttctctttaataaacgctgcggctttatcactcggagaggtttcgaaacggatatccagtttcttatcgccagctatcggtgctaaacgccagttgttatctgccgccgggtgaatttcccccgcacgtttgctctcatcagcaatccacgctgccagcacgctgcggttctcatccggactagcaaaagcgatatggctgtcgcccgtaccggcaaatttgccgccgtaagcgcgatagttattggtggcaaccaggaacatggcgttcggatcaatcggcttgccattaaaggtcaggttcttaatcctttccgcattggcattaatcatctggcactcgccgtcataacgggcgggctgggtaacatcaatctgataattcacaccatcaataacatcaaagttataagtgcggaaaccatcccagttgatgagactctgtggtttcgtgctgttgggatcaatctggttaaactgtcccgcggagcactccagccactctttcacctctttaccgctggctttcaccacaatcagcgtattgggatagagataaagatcggcggcattacggaaggtcaactggcctttttccacctccacatagcttgccgggtcatttttgcgaccaccgactttaaacggtgcggcagcactaagcaccggcagttttgccagatccggatcgccctgaatgtaatgctcgacatacgctttttgcgcgttgttcaccacctgcacggtcggatcgtcctgcaccagcgccagatagctatacatattgtcggcagatttaccgattggcttgctgacgaactggcgtgtggcatcgtgatcggctttgagtgtttctaccagcttgctgtcttccgccgcgagggattttttattagcgatgtcgtaaatcggtcgtgcttccgctttcgcctgcgtcacctgccatttaccgctgtcattactgagttgtaagtcgaccacaccaagatgatcgccccacatgcctggcattaccgccggaacaccattcagcgtgcctttggcgatatcagccccttcgatatcagcaaaatctttacctgggaaaacggcgtgagcatggccaaacataatggcgttaacgcccggaatttcactgaggtaataaacactgttttccgccatcactttatacggatcggcagatagcccggaatgtgccagaacgacaacaacatcggcacctttctcgcgcatttcaggcacgtatttgcgcacggtttcggtaatatcattcaccgtcactttcccggataaattagctttatcccagcccatgatttgtggtggcacgacgccaatatagccaatcttcagcgtctgtttttttccgtctttatcgaccacttcggtgtctttaattaaatacggtgtaaacattggctgtttggttctggcgtcaatgacgttggcatttacataagggaatttcgctcctgccagcgcatttttcaggtaatccagaccgtagttaaactcgtggttgccaagcgttccgacggtatagtccagcgtatttaatgccttatagaccgggtgaatatcacctgcttttaatcctttcgcgctcatgtaatcggccagcggactcccctgaatcaaatcgccgttatcaaccagtacgctgtttttcacttcattgcgggcatcgttaatcaggcttgccgtacgtaccagtccgaatttttccgtggcggtgtctttgtaataatcgaaatccatcatgttgctatgcagatcagtggtttccatgatacgcagatcgaccgtcgctgcattcacactggcggcaatcagcgtggccaggagcgttgcgctaaacttaatcatcagggacatccttttatcatcgggaatacgaaagaaaagggagaataaacgtcttacttatagaacagtgaagaatgccacaattttacgctttgaaaatgatgacactatcacagttggcgcattcattaacgatagggtataagtaaaacaataagttaacaccgctcacagagacgaggtggagaaatgttagatcaagtatgccagcttgcacggaatgcaggcgatgccattatgcaggtctacgacgggacgaaaccgatggacgtcgtcagcaaagcggacaattctccggtaacggcagcggatattgccgctcacaccgttatcatggacggtttacgtacgctgacaccggatgttccggtcctttctgaagaagatcctcccggttgggaagtccgtcagcactggcagcgttactggctggtagacccgctggatggtactaaagagtttattaaacgtaatggcgaattcaccgttaacattgcgctcattgaccatggcaaaccgattttaggcgtggtgtatgcgccggtaatgaacgtaatgtacagcgcggcagaaggcaaagcgtggaaagaagagtgcggtgtgcgcaagcagattcaggtccgcgatgcgcgcccgccgctggtggtgatcagccgttcccatgcggatgcggagctgaaagagtatctgcaacagcttggcgaacatcagaccacgtccatcggctctagcctgaaattctgcctggtggcggaaggacaggcgcagctgtacccgcgcttcggaccaacgaatatttgggacaccgccgctggacatgctgtagctgcagctgccggagcgcacgttcacgactggcagggtaaaccgctggattacactccgcgtgagagcttcctgaatccggggttcagagtgtctatttactaaattcagatggcagaaacagtgtatttcctgattctgccatcctgatttctcccaacctaaaaagttataaataaaaagagattgtatttaaagtgcaaaaattcaattgctaataagttacattttaataatgagcgttttttgatagtttacttctatagtgagatatttaatggcgacataaagtaaccaaataaaataaggttgtcatatgttacccaggatcagacacaataattttattggtgcggtggagttatttgtaaagtctagctatacaaaaacacatagtaacaatttttttaacaacatccatcatgcatttaagaaaaaagattggattagcaattatgatagcctgttaactttgagggagttctttcgttgcgcaactcagattgataaaagtggttatcaggtgcttagtagtaaaaatgaaactgttcacgccatggataagtttcttatcagtttcagccttaaagataacggtgccgaatatacaatgacattgcgaggtagtggatttgaatacgaagaaatacccataacaataaatgaatataacagtttcatggatttcaaaaaccgtgaatttccgttagaacaaaacagacgattgtatgcccgggatattctacagaaaaaacagtctgacataccgaaaaggattaaaggttatattcaccaggcgattggtgacgtgtctttaggttatgccttattggaggatatagtaagcaaattaaaacggggtaaatttgaactccaaataccaggaggtggaattaaagaatgcgatggatggtatatttacgaaaaaataattgatgataattttgccatagtcatagaatctttgggctttgcgcttaaaatctatggaggggatgaacgttttcgtaatggttcctctgttgttttggaggatgaagattactctcttatttataattttctggttaatgcaggttgccaacaagtcgaattagccgaacaagtggatgcgatagtaagtgcgaatctggccgcagatagcgatattaccaaagaaaagatttgcgagaaatataaaagcaccattgaggcgtttaaaaaagagcaactagcgttaccagtattagttcggcgtaagaacagtgagacttaattcccctatcccatagataacgataggggaaaattatttttgcagaatttatgttattgccattatttgagcaacttttgcagcaggtccatcacttgctgcacctcttccggtgtgagcgccccgtctttggcccattgcacgcgaccatccttatccagcaccactacagcggaactttcttcatccagctgccaggcaccgagcgcgacgccattgctatcgacaataaactggctccagggataaagctttttattactctccagactgctgcgcacaaacatcccactacccggaatcgcgtcgtcggtgttaacaatggtggtggtctggtaacgatcgtgcggtaacttcgcacttttaatcgcttcaatcagcgtcgcgtttttctcttttgcagaggtgcgaccagcaatatgttgcagtactcgcacttttcccactaactgcgcgctgttccaggttttgtagctaaactgatctttatcaagcaccaactcgccccgatcggtaatgccaatcggcggcactcgctgaccggtttcgaactgatgtgcggaagccatcatcggcaacagcaggcaggtgagtgccagaatcttgcgtagggtcatggtgtttccttcttatgatatgcaggtgatccgaccacttgggtctgagttttaatcatatgtgctatttatcgaatttcccgcaagtgtgatgccagtttgcggtcaagcgcacaaatcatatgaaaaatgaatgcttatactgaagaccgcgcttcggtaaaaagataattctgaataattgtaacctttaggtaaaaaaagttatacgcggtggaaacattgcccggatagtctatagtcactaagcattaaaatttgcgcctcataatagttgggccgattgtggcaccgcacaggcgtaatactcagcaggagataacaatgaaaattttccaacggtacaacccacttcaggtggcgaagtacgtaaagatcctgttccgtggacggttatacatcaaggacgttggcgcttttgaattcgataagggtaagattcttatcccaaaagtgaaggataagctgcatttgagtgtgatgtccgaagttaaccgtcaggttatgcgtctgcaaacagagatggcttaaccaaagtgctatgcagtaaaaagtgctatgcagtaataagacggctcctgattcaggagccgttgatgtttctgggggttacgcgacgctttcttctttatctttagcgtcaggcagttttgggctaagggcggtggccttgctgtcgatccgggtcaccagcagctggtcgatgcggtagttatcgatatccaccacttcaaatttgtagccggcgaatttcacgctatcggtgcgtttcgggatcttacgcagcataaacatcataaagccgccgatggtttcgtagttgccgctctgcgggaactcgtcaatatccagcacgcgcatgacgtcgtcaattggggtgccgccgtcaatcagccaactgttctcatcacgggcgacaatctgctcttccagcccctgaccgaccagatcgcccatcagcgtggtcatcacgtcattgagggtgatgatccccaccaccagcgcgtactcgttcatgatcaccgcgaagtcttcacctgcggttttaaaactttccaacgcctcactaagggttaacgtatccggcacaatcagcgtgttgcgaatttgtacgccgctgttcagtgccaggctttggttagccagcacgcggttcagcaggtctttagaatcgacataaccgatgatgtggtcaatatcttcattacagacgaggaacttagagtgcggatgttccgccaccttattcttcaggctttgctcatcttcgtggagatcaaaccaaatcacgttttcacgcggtgtcatactagacggaacggtacgggattccagctcaaagacgttttcaatcagctcgtgttcctgtttacgtaacacgcccgccagcgcaccggcttccactaccgcgtagatgtcatcagaagtgatgtcatctttacgtaccattggcagtttgaaaatacggaagattatgttcgccaggccgttgaagaaccacaccagcggggtgcaaacgtacaggcagaagcgcatcgggttgatgatacgcaaagccacagcttctggcgcaatcataccgatgcgtttcggggttaaatccgcaaacaggataaacatgccagtcactaagctgaaagagagaataaagctcagttgctcagagagctctgcgctcatatagcgggagaacaggctgtgaaaagctggagaaaatgccgcatcaccgacgataccgccgagaatcgccactgcgttcagaccgatttggaccacggtaaagaacatgccgggattttcctgcatattcagaacgcgttgggcatttatattgccttcatcagccagcagtttaagtttgattttgcgactggcggcaaggctgatctcggacatgctgaagaacgcacttacagcgatcaagcagagtatgactaaaatactgtttaacatatcttatccgacctttcaggccagatcctcggaaggggaagttgattaatttgtgtgaaatacacattgaaagccgattcgaagaaagtgaaccggcattttcagtggctagtatagcgtaaggtactgtaaagccgccagagggttaaaattcagacagctgaaaaatgcaaaactgcctgatacgctatgccgatcaggcctacgcagtccttgcaatatattgaatttggacgattttgtaggcctggtaagtcgtttacgccgcatcaggcatagacaaagagcactttatcaacaaactacatttgtacccgtaacgttatgcttccggcggcagacagacgccaattccgccaattccacagtaaccatacgggtttttatgcagatattgctggtggtcatcttcggcataataaaacggtgtggcgttagcgatttccgtggtgatgtgacgatcgtcatcggcggcaagcatcgccgcctgaaaacgttccagactggcgcgagctgcggcatcctgttctggggtcagcggataaatcgcactacgatactgcgtgccgtggtcattgccctgacgcattccctgggcgggatcgtgattctcccaaaatacctgtagcaactgctcatagctgatgacggaaggatcgtaaacaatgcgtaccgcttcggcatgacccgtatcaccggagcacacttcccgataagtcggatttggcgtatagccgccggtatagcctgcggcggtgctgtaaacgccgggtaactgccagaacagacgctccacaccccagaaacaacccatcgcaaaaatggcaatctccattccgtcaggtacattggtcatactgtgaccgttgaccgcatgcagcgtggctacgggcatcggggtgttacgtccaggcagggcatcggcgggggaaaccagatgctttttatcaaataaactcatggtgtcgctctcccgaaaatcggtcattggggttaaggttgtaacaagaggcgtatttgcacacaataaccaccgtgaataggtctaaagtaaaacataagaaatatttggggtttagtctgctttttaatccatattactggatttttgttaagccgtttaacggcgttccaggggcaggaaaaaaggatattcaggagaaaatgtgcgctatatccgacagttatgctgtgtaagcttactctgcttaagcggatctgccgtcgccgcgaacgtccgtctacaggtcgaggggttaagcggacagctggaaaagaacgttcgtgcgcagctttctacgattgaaagtgatgaagtgacgccagaccgtcgctttcgcgcacgcgtcgatgatgccatccgcgaaggtctgaaagcgctgggttattaccagccgaccattgaatttgatctccgtccaccgccaaagaaagggcggcaggtattgatcgccaaagtcacgccaggcgtgccggtgttaattggcggcaccgatgtggtattgcgcggcggcgcgcggaccgataaagactatttgaaattgctcgatactcgcccggctattggcacggtactgaaccagggcgattatgaaaatttcaaaaagtccttaaccagcattgcgttgcgtaaaggttatttcgatagcgaatttaccaaagcgcagctgggcattgcgctcggcctgcataaagccttctgggatattgattataacagtggcgaacgttaccgctttgggcatgtgacctttgaaggaagtcaaatccgcgatgaatacctgcaaaatctggtgccgtttaaagagggcgatgagtacgaaagcaaagatctggcagaactgaaccgccgactttctgctaccggctggtttaacagcgtggtggtggctccacaatttgataaagcgcgcgaaacgaaagtattaccattgacgggcgtggttagcccgcgaacagaaaacaccatcgaaaccggggtcggttactctacggacgtgggaccgcgcgtgaaagcgacgtggaaaaagccgtggatgaactcttatggtcacagtctgaccaccagtactagtatttccgcgccggaacagaccctcgacttcagctataaaatgccgctgctgaagaatccactggaacaatattatttggtgcagggcggttttaagcgcactgacctgaacgataccgaatctgactccactacgctggtggcttctcgctactgggatctctccagcggctggcagcgtgccattaacctgcgctggagtctcgaccactttactcagggtgaaattaccaataccacgatgctgttttatcctggggtgatgattagccgcacgcgttctcgtggtggcctgatgccaacctggggcgacagccaacgctactctatcgactactccaacacggcctggggtagtgatgtcgatttctccgttttccaggcgcagaacgtctggatccgcacactgtacgatcgccatcgttttgttacacgcggcacgctgggctggattgaaaccggtgatttcgacaaagtaccgccggatctgcgtttcttcgccgggggcgaccgcagtattcgtggctacaaatacaaatctatcgctccgaaatacgccaacggtgacctgaaaggggccagcaagttgataaccggaagcctggaataccagtacaacgtgaccggaaaatggtggggcgcggtgtttgtcgatagtggcgaagcggtaagcgatattcgccgcagcgactttaaaaccggtaccggggtcggcgtgcgctgggaaagcccggtcgggccaatcaaactcgattttgccgtaccggtcgcggataaagacgaacacgggttacagttttacatcggtctggggccagaattatgagtttatggaaaaaaatcagcctcggcgtggttatcgttatcttactgttgctgggaagcgtggcgtttctggtgggcaccaccagcggcctgcatctggtatttaaagcggcggatcgctgggtgccaggactggatattggcaaggtcaccggcggctggcgcgatctcaccttgtctgacgttcgttatgagcagccaggcgtggcggtaaaagcgggcaatctgcatctggctgtcgggcttgagtgcctgtggaacagcagtgtttgtattaatgatctggcgctgaaagacattcaggtcaacatcgacagtaaaaaaatgcctccttctgaacaggttgaagaagaggaagatagcggtccgctggatctctccacgccgtatcccatcaccctgacacgggtggcactggacaacgtcaacattaagattgatgacaccacggtaagcgtgatggacttcacctccggcctgaactggcaggagaaaaccctgaccctgaaaccgacgagcctgaaaggcctgctgattgctctgccgaaagtggcggaagtggcgcaggaagaagtggtcgaaccgaaaattgaaaatccgcagccggatgaaaagccgctcggcgaaacgctgaaagatctcttttctcgcccggtattgccggaaatgaccgacgtgcatttgccgcttaacctgaacattgaagagtttaagggcgagcagctgcgcgtgacgggcgacacggacatcaccgtgagcaccatgctgctgaaagtgagcagcattgacggcaatactaaactggacgccctggatatcgattccagtcaagggatcgtcaacgccagcggcacggcgcagctgagtgacaactggccggtggacatcactctcaacagtacactgaacgtggagccgttgaaaggtgaaaaagtgaagctgaaaatgggcggcgcgctgcgcgaacagctggagattggcgttaatctttccggtccggtggatatggatttacgcgcccagacgcgactggcggaagccggattgccgctcaacgtggaagtgaacagcaaacagctttactggccgttcactggtgagaagcagtatcaggcggatgatctgaaactgaaacttaccggcaaaatgaccgattacacgctctctatgcgtacggcagtgaagggacaggagatcccgcccgcgactattaccctcgacgccaaaggtaatgaacagcaggtcaatctcgacaaactcaccgtcgcggcgctggaagggaaaactgaactcaaggcgttgctcgactggcaacaggccattagttggcgcggtgagctaacgcttaacggcattaacaccgccaaagagttcccggactggccgagcaaactcaatggcttgattaaaacccgcggtagcctgtacggcggcacctggcagatggacgtgccggagttgaagctgaccggtaacgttaaacagaacaaagtgaacgttgacggcacgctgaaaggcaacagttatatgcagtggatgatcccagggcttcatctggaactcgggccaaacagtgccgaagtgaaaggcgagctgggggtaaaagatctcaatcttgatgccaccatcaacgcgccggggctggataacgcgctgccggggcttggcggtacagcgaaagggctggtgaaagtacgcggcacggtggaagcgccacaactactggcagatatcaccgcgcgcggcctgcgctggcaggaactttccgtggcgcaggttcgcgtggaaggcgatatcaaatccaccgatcagatcgccgggaaactcgacgtacgcgttgagcaaattagccagccggatgtaaatatcaacctcgtcaccctgaatgccaaaggcagcgaaaagcagcacgagctacagttgcggattcagggggagcctgtctccgggcagcttaatctggcaggaagttttgatcgcaaagaagaacgctggaagggaactcttagcaatacccgcttccagacgccggttggcccgtggagcctgacccgcgatattgcgctggattaccgcaataaggagcaaaaaatcagcatcgggccacactgctggcttaacccgaatgcggaactgtgcgtgccgcaaactatcgatgcgggggccgaagggcgtgcggtggtgaatctcaaccgcttcgacctcgccatgctgaaaccgtttatgccagaaaccactcaggccagcggtatcttcacgggtaaagcggacgttgcctgggacaccacgaaagaggggctgccgcagggcagtatcacccttagcgggcgtaacgtgcaggtaacgcaaaccgtcaacgatgcggcgctgcccgtggcgtttcagacactgaatctgacggcggaattgcgtaacaaccgtgccgaattgggctggaccatccgcctgaccaataacggccagtttgatggacaggtgcaggtgaccgatccgcaaggccgccgtaatcttggtggcaacgtcaatatccgtaacttcaaccttgcgatgataaaccccatctttacccgtggggaaaaagcagcggggatggtgagtgccaacttgcgtctgggtggtgatgtgcaaagcccgcagttgtttggtcagcttcaggttacgggtgtggatatcgatggcaactttatgccgtttgatatgcaaccgagccagcttgcggtcaactttaacggtatgcgcagcacgcttgccggtacagtacggacccagcagggtgaaatctacctgaacggtgatgccgactggagccaaattgaaaactggcgggcgcgggtaacggcgaaaggcagtaaagtgcggatcaccgtgccgccgatggtacgaatggatgtaagcccagatgttgtattcgaggctacaccaaacctgtttaccctcgatggtcgcgtggatgtcccttgggcgcgcatcgtggtgcacgatctgccggaaagcgcagtaggcgtctccagcgatgtggtgatgcttaacgataacctgcaaccggaagagccgaaaacggcgagcattccgattaacagtaacctgattgtccacgttggcaacaatgtgcgcattgacgcctttggcctgaaagcgcggctgacgggcgatctcaatgtcgttcaggacaaacaagggctgggtctgaacgggcagatcaacatccctgaagggcgcttccatgcctatggtcaggatctgattgtgcgtaaaggtgagttactgttctctggtccgccagatcaaccgtatcttaatattgaagctattcgtaacccggatgctacagaagacgacgtaatcgccggagttcgcgtcactggtctggcggacgaaccgaaagcggagatcttctctgacccggcgatgagccaacaagctgccttgtcttatttgctacgtggacaagggctggagagcgatcagagcgacagtgcggcaatgaccagcatgctgattggtttgggggttgcgcaaagtggccagattgtgggtaaaatcggcgagacgtttggcgtaagcaatttagcgctcgacacccagggagtaggcgactcctcccaggtagtggtcagcggctatgtattgccaggtctgcaagtgaaatacggcgtgggtatatttgactctatagcaacactcacgttacgttatcgcctgatgcctaagctatatctggaagccgtgtctggtgtagaccaggcactggatttgctctatcagttcgagttttaacaatgcgaatatttgtctacggcagtttacgccacaaacaaggcaacagtcactggatgaccaatgcccagttactgggcgatttcagtatcgataactaccagttgtatagcctgggccactatccaggcgcagttccggggaacggaacggtacacggtgaagtttatcgtattgacaacgccacgctggccgaacttgatgccttgcgcaccaggggcggtgaatacgcgcgccagttgattcagacgccgtacgggagtgcatggatgtacgtttatcaacgacccgtcgatggattaaagctaattgaaagcggcgactggttagacagggataagtaaccatatgcatacgccaccttcgggtggcgttgttttttgcgagacgactcgcattctgttttgtaattccctcaccttttgcttttctctccgagccgctttccatatctattaacgcataaaaaactctgctggcattcacaaatgcgcaggggtaaaacgtttcctgtagcaccgtgagttatactttgtataacttaaggaggtgcagatgcgtattaccataaaaagatgggggaacagtgcaggtatggtcattcccaatatcgtaatgaaagaacttaacttacagccggggcagagcgtggaggcgcaagtgagcaacaatcaactgattctgacacccatctccaggcgctacagccttgatgaactgctggcacagtgtgacatgaacgccgcggaacttagcgagcaggatgtctggggtaaatccacccctgcgggtgacgaaatatggtaaagaaaagtgaatttgaacggggagacattgtgctggttggctttgatccagcaagcggccatgaacagcaaggtgctggtcgacctgcgcttgtgctctccgttcaagcctttaatcaactgggaatgacgctggtggcccccattacgcagggcggaaattttgcccgttatgccggatttagcgttcctttacattgcgaagaaggcgatgtgcacggcgtggtgctggtgaatcaggtgcggatgatggatctacacgcccggctggcaaagcgtattggtctggctgcggatgaggtggtggaagaggcgttattacgcttgcaggcggtggtggaataaggtgtgtttatttatcgcgggcataaaaaaacccttactaaccgaagcccggcgttcagggttattacgccagaagaacttatttattctttgcgcgctcgaaggaggcaacgatttcagctttagcggcttctgcgttttcccaaccttcaactttcacccacttgcctttttcgaggtctttgtagtgctcgaagaagtgagcgatttgcgctttcagcagttcaggcagatcgttaacgtctttaatgtgatcgtattctttgctcagcttgctgtgcggaaccgcaaccagtttcgcatcttcaccggcttcgtcggtcattttcagaacgccaaccggacggcaacggatcacagaacccggctgcagcgggtacggagttgggaccagtacgtcaaccgggtcaccgtccagagacagggtgtggttgatgtaaccgtagttgcatggatagaacatcgcggtggacatgaagcggtcaacgaacagtgcgccgctctctttgtcgatttcgtatttgatcggatctgcgttagccgggatctcaataacaacgtagatgtcttccggcagatctttacccgcagggacgttgagtaagctcatgtctgtttcctttaaaaatatgtggcaaacaagtgccgagtattatagccaactcgcgccgaatgtcttcgcttgttttcgtcttcattttcctttttcaccagttttaagacggtatacagagcaggaaaatccataaccgtagccgcatttttcatagtgagatgaaagcgattacaaacttgtgattaacgttttatttacttttttgaagtgtgatgtaacgcaatctgttacataacgaattgtctatagttttttcgcgaacatcttttaaccaataataactaccccgacgaggacaaccctatgtggaaacgcttacttatagtctctgcagtcagcgcagccatgagctctatggcgttggccgctccattaaccgttggatttagccaggtcggaagcgaaagtggctggcgtgccgcagaaaccaatgtggcgaaaagtgaagccgaaaagcgcggaatcacgttgaaaattgccgatggtcagcaaaagcaggaaaaccagattaaagcggtacgttccttcgttgcacaaggggtggatgcgatctttatcgctccggtggtcgcgacaggttgggaaccggtattaaaagaggcgaaagatgccgaaatcccggtattcttgctcgatcgttccattgatgtgaaagacaaatctctctatatgaccaccgtcactgccgacaacatcctcgaaggcaagttgattggtgactggctggtaaaagaagtgaatggcaaaccatgcaacgtggtggagctgcagggcaccgttggggccagcgtcgccattgaccgtaagaaaggctttgccgaagccattaagaatgcgccaaatatcaaaatcatccgcagccagagtggtgacttcacccgcagtaaaggcaaagaagtcatggagagctttatcaaagcggaaaacaacggcaaaaacatctgcatggtttacgcccataacgacgacatggtgattggtgcaattcaggcaattaaagaagcgggcctgaaaccgggcaaagatatcctcacgggttccattgacggtgtaccggacatctacaaagcgatgatggatggcgaagcgaacgccagtgttgaactgacgccgaatatggcaggtcccgccttcgacgcgctggagaaatacaaaaaagacggcaccatgcctgaaaagctgacgttaaccaaatccaccctttacctgcctgataccgcaaaagaagaattagagaagaagaaaaatatggggtattgagggttgctatgcctgatgccgattcgtaggccggataaggcgctcgcgccgcatccggcgatggtgcactgaagcctgatgcgacgcttaccgcgtcttatcatgcctactgggagcacgctttacaccgggggaaaccatgacgaccgaccaacaccaggagatcctccgcaccgaaggattaagtaaatttttccccggcgtcaaagcgttagacaacgttgatttcagcctgcgccgtggcgaaatcatggcgctgctcggtgaaaacggggcgggaaaaagtacgctaatcaaagcattaactggtgtataccacgccgatcgcggcaccatctggctggaaggccaggctatcagtccgaaaaataccgcccacgcgcaacaactcggcattggcaccgtctatcaggaagtcaacctgctacccaatatgagcgtcgctgataatctatttataggccgcgaacccaaacgcttcggccttctacgccgcaaagagatggaaaagcgcgccaccgaactgatggcatcttacggtttctccctcgacgtgcgcgaaccgctcaaccgctttagtgtcgcgatgcagcaaatcgtcgctatttgtcgggctatcgatctctctgccaaagtgctgatcctcgatgaacccaccgccagtctcgacacccaggaagtggagttactgtttgacctgatgcgtcagttgcgcgatcgcggcgtcagcctgatttttgtcactcactttctcgatcaggtctatcaggtcagcgatcggatcaccgtcttacgcaacggcagtttcgtaggctgtcgggaaacgtgcgagctaccgcagatcgaactggtaaaaatgatgctggggcgcgagctggatacccacgcgctacagcgtgccgggcgaacattgttgagcgacaaacccgttgccgcgttcaaaaattacggcaaaaaaggaacgatcgcaccgtttgatctcgaagtacgccccggcgagatcgtcggtctggctggattgctgggaagtggacgtaccgaaaccgccgaagtgatcttcggtatcaaacctgctgacagcggcacggcgttgatcaaaggcaaaccgcaaaacctgcgaagcccacatcaggctagcgtactgggcattggcttctgcccggaagacaggaaaaccgatggcatcatcgctgccgccagcgtgcgggaaaatatcatcctcgctctccaggcccagcgcggctggctacgtcccatttcccgcaaagaacagcaagagattgccgaacgctttatccgccagcttggcattcgcacacctagtactgaacaaccgattgaatttctctccggcggcaatcagcaaaaagtgttgcttagtcgttggctactgacccgaccgcaatttctgatcctcgatgagccaacccgcggcattgatgttggtgcccacgccgagatcatccgcctgattgaaacgctatgcgccgatggtctggcgctgctggtgatctcctccgaactggaagagctggtgggctatgccgatcgggtgattatcatgcgcgatcgcaaacaggtggcggagatcccgctggcagagctttccgttccggcgatcatgaacgccattgcggcgtaaggagaacagtgtgatgcctcaatctcttccggacaccactacgccaaaaaggcgctttcgctggccgacggggatgccgcagctggtagcactattgctggtgctgctggtcgatagcctggtagccccgcatttctggcaggtggtgcttcaggatgggcgtttgttcggtagccccatagacattcttaaccgtgcagctcccgttgcgttactggcgattggcatgacgctggtgatcgccaccggtgggattgatctctccgtaggggcggtgatggctatcgccggagccacaacggctgcgatgacggtcgcgggattcagcctgccgattgttttgttaagcgccctgggcaccggcatcctggcgggattgtggaacggcatactggtagcgatcctcaaaattcagccgtttgtcgccactctgatcctgatggtcgccgggcgcggcgtggcgcaactgatcaccgccgggcagatcgtcacgtttaacagcccggatctcagttggttcggcagtggaagcctgttgttcctgccaacgccggtcattatcgcggtgctgacgcttatcctgttctggctgttgacccgcaaaacggcgctggggatgtttatcgaagccgttggtatcaacattcgggcggcaaaaaatgccggggtaaacacgcgaatcatcgtcatgctcacttatgtgttgagcgggctgtgtgcggcgattgcgggcattatcgtggcggcggatattcgcggtgccgatgccaacaacgctgggttatggctggagctggacgccattctcgcggtggtgattggcggcggaagcctgatgggcgggcgctttaacctgctacttagcgtggtgggggcgctgattattcaggggatgaacaccggaattttgcttagcggctttccgccagagatgaaccaggtggtgaaagcggtggtggtgctttgcgtgctgattgttcagagccaacgctttatcagtctgattaaaggagtacgtagccgtgataaaacgtaatttgccactgatgatcaccatcggcgtctttgtgttgggttatctttactgcctgacccagtttcccggttttgcttccacaagagtgatctgcaatatcctgaccgataatgcctttcttgggatcattgccgttggcatgacctttgtgatcctcagtggtgggatcgatctctccgtcggtagcgtgatcgcctttactggcgtgtttctggcaaaagtgattggcgatttcggcctcagcccgctgctggcgtttccgctagtgctggtgatgggctgtgccttcggcgcatttatggggcttctgatcgacgccctgaagatcccggcatttatcattacgcttgcggggatgttctttttgcgcggcgtcagctatctcgttagcgaagagagcattccgataaaccatcccatttatgacacgctcagtagccttgcgtggaaaatccctggcggcggtcgcttaagtgcgatgggactgctgatgttggcggtggtggttatcggcatattcctcgcgcatcgtacccgttttggtaatcaggtatacgccattggcggcaacgcaacgagcgcgaatctgatggggatttccactcgcagcaccactattcgcatttatatgctctccaccggactggcaacgctggcggggattgtcttcagcatttatacccaggccggatatgcgctggcgggcgtaggtgtggaactggatgctatcgccagtgtggtaattggcggtacgcttttgagcggtggcgttggaacggtattagggacgctttttggcgtggcgattcagggactgattcagacttacataaactttgatggcacgctgagttcctggtggacgaaaatcgccatcggtattttgttgtttatttttatagcattacagcgtggattaacggtgctgtgggagaatcgtcagagtagcccagtgacaagagtcaacattgcgcagcaataaaaacgcctctccgtgtggagaggcgcaggagattacgcgtccgggaactcacggataaagcgttcgacatcttcaaccatatggtcgttgccgacaaagaaactacggcgctggtgcagggtttccgggatgatatccagaatacgctctttgccatcgctcgctttaccgcccgcttgttccgccaggaatgccatcgggttgcactcatacagcaaacgcagtttgccgtccgggtggctggcggtgcttgggtagagataaataccgcctttcagcaggttacggtggaaatccgcgaccagactaccgatataacgactggtataagggcggttggtggatttatcttcttcctggcagaatttaatgtacttcttcaccccgttcggaaacttaatgtagtttccttcgttgatggagtaggttttgcctttctccgggaagcgcatccgttcctggcacaggcagaaaacgccgaggctaggatcgtaagtaaaggcgtgaacaccgcatccggtggtgtaaaccagcatggtagaggagccgtataccacgtaacctgccgcaacctgtttgttaccaggctggaggaaatcttcttccgttaccggcgtgccaacaggcgtaacgcggcggtagatggagaaaatggtaccgacagagacgttaacatcgatgttggagctgccatccagggggtccatcagcaccacgtattttgcgtgttcacagccttcaaagacgacaatctcatcttcttcttcagaggcaatgcccgcaacgatatcgcgtgctttcagtgcggctttcagtttttcattagcgaacaagtcgagtttctgctgaacctcgccctgcacgttctcagcaccgctggcacccaggatatcaaccagtcctgctttgttgatatcgcgatggataatcttggcgcccagttttattgcgctcagcaaagcagtgagctcaccggtagcatgagaaaactcgtgctgcttttcgacaataaattcacctaacgttttcataaaactttccctgcaatgtttatggagtaaagcgaccgcaacaatcttaacaaataatctcaatgttgcgctcaggtgaatcgcgccagcaaattacggattatcctgaaatgcgtttctcacttgcccgacatatgcgtaaaatgagcggcagattaaaaaaggatagtgacgtatgcgcattcatattttaggaatttgtggcacatttatgggcggtctggcgatgctggcgcgccagttaggccatgaagtaacgggtagcgacgccaatgtgtatccgccgatgagcaccttacttgagaagcaaggcattgagctgattcaggggtacgatgccagccagctcgagccgcagccggatctggtgattattggcaacgccatgacccgtggaaatccgtgtgtggaagcggtactggaaaaaaatatcccttatatgagtggtccacagtggctgcacgattttgtgctgcgcgaccgctgggtgctggccgttgccggtacacacggcaaaaccaccaccgcgggaatggcgacctggattctggaacagtgtggttacaaaccgggctttgtaatcggcggtgtgccggggaactttgaggttagcgctcatctgggcgaaagcgacttctttgttatcgaagcggatgagtatgactgcgccttcttcgacaaacgctctaaatttgttcattactgcccgcgtacgctgatcctcaacaaccttgagttcgatcacgccgatatctttgacgacctgaaagcgatccagaaacagttccaccatctggtgcgtatcgttccggggcagggccgtattatctggccggaaaatgacatcaacctgaaacagaccatggcgatgggctgctggagcgagcaggagctggtgggtgagcagggtcactggcaggcgaaaaagctgaccaccgatgcttccgaatgggaagttttgctggatggcgaaaaagtgggcgaagtgaaatggagcctggtaggcgaacataatatgcacaatggcctgatggcgattgcagcggctcgccatgttggtgtagcgccggcagatgccgctaacgcgctgggtagctttattaatgctcgtcgccgtctggagttgcgtggtgaagcgaatggcgtcacggtatatgacgattttgcccatcacccgacggcgattctggcaacgctggcggcgctgcgtggcaaagttggtggtacggcgcgcattattgctgtgctggagccgcgcagcaataccatgaaaatggggatctgcaaagacgatctggcacctagtttaggtcgtgccgatgaagtcttcctgctgcaaccggcgcatattccgtggcaggtggcagaagtggcagaagcctgcgttcagcctgcacactggagtggcgatgtggatacgctggcagatatggtggtgaaaaccgctcagcctggcgaccatattctggtgatgagcaacggcggttttggtgggatccatcagaaactgctggatgggctggcgaagaaggcggaagccgcgcagtaattcggccttagccagatatagtatgcgtaggccggataaggcgttcacgccgcatccggcatttgagcatagtgcctgatgcgacgcttgatgcgtcttatcaggcctacaggtgcaccgtatccggcaaaccatactcacatcaacaacgaaaattacccttcgttctccgctaactcgcgcagatactggaaaatctggcgtgcggatttcggcggcttattcccttctttctctttcttcgcgttgcggatcagagtacgcagttgctgacgatcggcatcgggccacagatttaatacctcagcgatggcgtcatcaccttgatcgatcagacgatcgcgcaggttttccagtttatggaacagcaccacctgctggttgtgacggtttttcagcttatccagcgcctgacgaataggctctacgtcgcgctggcgcagcatcttaccgatgagctgcaactggcggcggcgaccttccatcttaatacgctgggcgagctcaatagccgcgcgcagatccgcatctaacgggatcttatccagcgcgtttttccccagatcaacaatttccgcgccaaggcgttttagctcctcggcatcacgtttaatttcacttttactgacccagataatttcatcgtcttcgtcttcgatgtcatcaccgggaacgtcgtcgagccagtcttcgggctgcttagtcatctcaggctccttaaaaaaagaggctaatgttaccagttaagatgcgcactgaaaaacggttctctgttagacttcagagaaactctctacattatggcacttgcaatgaaagtaatctctcaagttgaagcgcagcgcaagattctggaagaagcagtttccactgcgctggagttggccagtggcaaaagcgacggtgcggaagttgccgtcagcaagaccaccggcattagcgtaagcacgcgttatggtgaagtggagaatgttgaattcaatagcgatggcgcgctggggatcactgtttatcaccagaaccgcaaaggtagcgcaagttccaccgatttaagcccgcaggccattgcccgtactgtacaggcggcgctggatattgcccgttataccagcccagatccctgtgccggcgtggcagacaaagagctgctggcctttgacgcaccagatctcgacttgttccaccctgcggaagtttccccggatgaagccattgaactggcggcccgcgcagaacaggcggcattgcaggcggacaaacgcatcaccaataccgaaggtggcagctttaacagccactacggtgtcaaagtttttggcaacagccacggcatgttgcagggttactgcagtacgcgtcatagcctctccagctgtgtaattgccgaagaaaatggcgatatggagcgtgattacgcctacaccattggtcgtgcgatgagcgatctgcaaacgccagagtgggttggggccgactgtgctcgccgtactttaagccgtctgagtccgcgtaaactctccaccatgaaagcgccagtcatttttgccaatgaagtggcaaccgggctttttgggcatctggtgggggcgatagcgggtggaagcgtttatcgtaaatctaccttcctgctggatagcctgggtaaacaaattctgccggactggctgaccattgaagagcatccgcatctgctgaaagggctggcgagcacgccattcgacagcgaaggtgtgcgcaccgagcgtcgcgatattattaaagatggcatcctgactcagtggctgctgaccagctacagcgcgcggaaactggggctgaaaagcaccggacatgcgggcggtattcacaactggcggattgccggacaaggtctaagcttcgagcagatgctcaaagagatgggcaccgggctggtggtgacggaattgatgggccagggcgtgagtgccattaccggtgattattcccgtggtgcagcgggcttctgggtagagaatggcgaaattcagtatccggtgagcgaaatcaccatcgcaggtaatttaaaagatatgtggcgcaatattgtcaccgtcggtaacgatattgaaacacgcagtaatatacagtgtggttctgtgctgttgccggagatgaaaatcgccggacagtaaaaaaactggcgcgacctgccgcgctataaactaaaaaattacacaaaatcattcgcactgcatcgagacggaaagtgaatgagggccggggagcgtactcgcagtacgtgacccggtcgaatgagcgtagtcgtcgatgaggcagtgtgaaggatgaagtgtaaataaaaaaggaactattcttgcagtctcctcgttggtattcagttcggcgtcatttgctgctgatctcgaagacaatatggaaaccctcaacgacaatttaaaagtggtcgaaaaagccgataacgcggcgcaagtcaaagacgcgttaacgaagatgcgcgccgcagcgctggatgcgcaaaaagcaacgccgccgaagctcgaagataaaagtccggacagcccggaaatgaaagatttccgccacggtttcgacattctggtcggtcagattgacgacgcgctgaagctggcaaatgaaggtaaagtaaaagaagcgcaggctgctgcagagcaactgaaaacgacccgcaatagttatcacaagaagtatcgttaattcctcatttccctgttgcctgcactcaggtaacagggaacttatcatcgcaaatgatgcaccacctgattgctgctgccgcgccagatcagggaagggtcttttaaatcctgcacaaatttgccgtcgaccagcacgttaatcaaatcaacaacctgcatttgcgcagcgttgagttcgtcgagtttatagcctgtccacacccagatgtctttacccggacactcggcgcggatgcgttgtaccagtttcagaatatccggcacgttttgcggatgcagcggatcgccgccggagagggaaataccctggcgtttgatacgagtgtcattcagatcgttaatgatctggtcttccattgctttggtaaatggctgaccggaatttacccgccatgtgcttttgttatagcaaccggggcattcatgaacacacccggagacaaacagggtgcaacgagtgccggggccgttgacgatgtcgacaggatagtactgatgataattcattatttcgcctggcttatcagtccgcgtgtaggctgcatccggtaatcaatgcctgatgcgacgctgtcgcgtcttatcagacctggagcaattgccaaatgtaggccggataaggcgtttacgccgcatccggcatttgcttagctcagagtgaagattaacctatctgcccattccccaaatgtttaacgcggcgcttaacttcttcctgcttaccagcgttaaacggacgtgcatccgggctacctaaatatccgcacacgcggcgagttacgctcacacgggaggcgtcatggttaccacatttcgggcaagtgaagcctttgctggtgcactcgaactcaccggtaaagccacactcgtagcactcatcaatcggtgtattggtgccgtaatacggtacatgctgatagctgtaatcccagacatcttccagcgccttcaggttgtgctgaatgtttggatactcgccgtagcaaatgaaaccaccgttcgccagcggcgggtaaggcgcttcaaagtcgatcttgtcgtacgggttcaccttcttctccacatcgaggtggaaactgttggtgtagtaacctttatcggtcacgcccggcaccacgccaaactcagcagtatcgagacggcagaagcgatcgcacaggttttcactcggcgtgctgtagagactgaaaccataacccgtttcttctttccactgatccactgcctgacgcagacgttcaacaatggcgatacctttcgcgcgaagctgctcgttgtcgtaaacatgctcgccgccgaacagcgcgttaatggtttcgtggatgccgatgtaacccaggctaatagacgcacgaccgtttttgaagatttcagaaacatcatcgtcagcattgagacgcacgccacaagcaccttccatatagaggatcggggccacgcgcgctttcacgccttcgagacgagcgatacgggtcatcagcgccttacgtgccagcaccagacgttcatccagcagcttccagaaggtggcttcatcgccttttgcttccagagcaatacgcggcaggttcaggctgatcacgccgaggttgttacgaccatcgtggatctgctcgccgttttcattttcccacacgccgaggaagctgcggcagcccatcggagttttaaagctaccggtgactttcactacctgatcgtagttcaggatatccggatacatgcgcttgcttgcgcactccagcgccagctgtttgatgtcgtagttcggatcgccttttttatggttcaggccatcgcgaatcgcaaacaccagtttcgggaacaccgcagttttacggtttttaccgaggcctgcgatacggttacgcaggatgctttcctgaatcaggcggctttcccagctggtgcccaggccaaaaccaaaggttacaaacggcgtctgaccgttggcggtgtgcagggtgtttacttcgtactccagactctggaaggcatcgtagcactctttgatggttcgagagttagcgtagccttcggcgtccgggatgttccactcttctgcggtcttgcgatgtttgttgtagctggcagtgacaaacggtgccagcacttcatcgatacggttaatggtggtgccgccataaatatggctggcaacctgagcaataatctgcgcagttaccgcggttgccgtagagatgctcttcggcggttcaatctcggcgttccccattttaaagccctgggtcagcatgcctttcaggtcgatcaacatgcagttgaacatcgggaagaacggactgtaatcgagatcgtgatagtgaatatcgccacgctcatgtgcctgcaccacgtcacgcggcagcaggtgctgacgtgcatagtgtttagccacgatcccggccagcaggtcgcgctgggttggaatcaccttgctgtctttgttggcgttttcgttgagtaagctggcgttggtctgctcgaccagaccacggatctcctggttcaggcgaccgcgtttttcacgttcaatgtcgcgatcgtgacggtactcgatgtaagcacgagccagttgtttgtatggaccactcatcagctgattttcaactgcggtctggatctcattgatatccacctggttgcggccctgcatctgctcgctgacaaccgcggcaacagtggcgcaataatcggcatcatcgacttccgctgctttagctgcacgcagaatcgcttctttgatgcgctcacttttaaacggcactttgcagccgtctcgtttcatcacatgcggtgtcatgatcgctccatatttttaagaacaggttatccacagaaattgggaaaggcgttttccggttttttcgtttcgttttccggtgctttccgcaatcgccatccgcttatccacaacgccgcacctttttcgtggggagctgtagtagcaattatagtcgattaatacaacatattgggttgggacgcattttaaagtctatatatagtgctttgcatcaaggatgtttgagctttttttgatgtagctcaaagtaaaaagcagagcgtacggatgacgggcgctacagcgatatgtaaattttttaatgaatttgctggttgaaaaatcaacaaaaacaacatactgacagacaaaaccccggaatgaccggcattaccggggcttagggaagatttacttctgtaaccaccagacagcctcaaaaggccgtaaattcatggcacagggttgtggactggcttcttcgtagttatgcatcacaagctgccagttgccgcgcatttgccctgcctgccagggttggatctcacggctaaggttggcaatgaccagcaaggtttgccccttccattcacggcgatagcaccacaatacagggctgtttggcagcagatcctggtaattgccccatgtcaggatggcttcctgcttacgcagtgcgattaacttttggtaggtgtaaaacacgctggaatcatcggccagcgcggcttctacgttgatttgttgatagttatcgcccaggccaatccacggttcgccagccgtaaacccggcattatcgccgttgctccattgcatgggcgtgcgactgttgtcacgggatttactggcgaggattgccaataactcgtcggcatcacgcccatcgttgcgcagctcggcaaacatattgaggctctctacgtcgcgatagtcagtaatgcgcgtgaaatgcgggttggtcatgccaatctcttcgccctggtagatatacggcgttccctgcatgccatgcagcaccatcgccagcatttttgccgcaggcacgcggtattcaccttcatcaccaaagcgagaaacaatgcgcggctgatcgtggttacaccagaacaaggcattccatgctacgttgtgcattccttgttgccagtggcggaacaatgttttcaacgccacaaagtcaggtttagccagcgtccatttttcaccaccgggataatcgaccttcaggtgatgaaaattaaaggtcatgctcaattcactgcctgtcagagccgcgtatcgctggcaatgctcaaggctggtggaggacatttcacctacggtcattaacccgcgtggcgtaaacacatcgcggttcatctcgtgcaaaaactcgtgtgctcgtggcccgtcggtgtagaagcgacgcccgtcgccgtccaggtcttcagggaaacgcgggtctttggagatcagattcaccacatccaggcgcaacccgtcgaccccacgatcggcccagaactcacagacttttttcagctctgcgcgtaccgctggattctcccagttgagatccgcctgttctggtgcaaagagatgcaaatagtactgttcgctttccgcatgccagcgccacgcactaccgccaaatttactacgccagttgttcggtggcgtttctggttctccatcgcgccagatataaaactggcggtaagggctttctttgttcagcgcctcgcgaaaccaggcatgttgggtagaggtatggttaaacaccatatcgagaatgatacgaatcccgcggctttttgcctgcgtcaccagttcgtcaaaatcgtccagcgtgccgtaggtgggatcaatcgccgtatagttcgctacgtcgtaaccgttatcgacctggggagagacataaaagggggttagccagatggcatcaacgcccagtttatgcagatagtccaggtgttggataacgccacgtaaatcgccggtaccgctacccgtggtgtcctgaaaactctttggataaatctggtagataacgccgttttgccaccagtggggaagatgagtcattacgttattcctgcgaatgcgagggggcgcaattgcgccccgaagaaaattaaacaatgtccagcgtgcccaggcggtatttccgctgatagataaagctggtgagtacaatcgggatgatgatggcgatagccattgccagcgcaaacacctgccagtagctcggttgaatgctgagaattcccggcaggccgcctacgccgatgccattcgccataacgccgttcaggccgcatagcaatcctgccagaccagaaccaatcatcgcgcacagcatcgggaagcgatatttcaggttgatgccgtacattgcaggctcagtgaccccaagccaggcggagatagcggcaggcacggagatctcgcgttcattgtgcttgcggctggaaatgataatgcctatcacggcggagccctgagcgatattgctcagcgcaatcagcggccacactggcgtaccacccatgctttgaatcatctgcaaatcaatagcaagcgtggtctggtgtacaccggtgatcaccagcggggcgtacaggaagccaaacaatgctgcgccaatcggagcaaagctgccggtcatcaggtgacgtaccgcaaaggcaacgccatcgccaatcatgcgaccaaacggaccaatcagcgcatgggcgaggaacaccgcgaggatcaggctacagacgggtaccaccaccagatagaggtaatccggcacgatgcgtttaaggcgagtttcaataacgcccagcgccagtccggctaacagtgccgggatcacctgcgcctgatagcctactttggcgatgctgaacatgccaaagtcccacacttccggcagctgctgcccgagcagataagcgttcatcagctgtggagaaaccagtgtcacgccaagcacgataccaaggatcggcgtgccgcccatttttttcaccgcactccagcaaataccgaccggcaggtagaagaagatcgcttcaccgatcaaccacagaaaatcgtagatcgtttgcagggaagggtacatttgcgccagcgtctgaccgttgctcatgggcaaatcgccgatcacattgcgaaaaccgaggatcaaaccgccgctaatcaacgcgggcagcaacgggaagaagatcaccgcgaaatgagagatcaactgctcatgccatttcatattatgccgggcggctttttttacctgctctttatcaacctgcgcctgtccggtactcgcaatcagtgcttgatagtaatcacccacgttggtgccaatcaccacctgaaattgcccggcattggtgaaacagcctttcaccatagggagttgctcaatttctttcggtctggcattggccggttggttgaggacaaagcgtaggcgagtaatacagtggctcaccgtcgcaatattgccgcgcccgccgaccagttcaatcaaccgatcgatatccgtttggtttattttgctcatcataaagccccatggcagatgacatttttggttggctgcagaatatattgcgcggaaaaatttaaaaacgggaacgttcccgaaacgcagcgaagatcacaatttatcgttcaggaaacgatcaggacagggtggcggggatgatgatttgttgcggttcgctgcgcccggttacctgcgcgatcaactggcaagccgcctggcgtccagcttcggcgtaaccgggatctacggttacgatctccggatggaggaatttcattaacggcgtattaccgacgctcgccagttgcaaggtgtcgatgcgttgctcttgcaggtatttacttgcgccaagtgccagcgtgtcggttgcgcacagtaaggcggtagtttcaggcgtaatcacttttgcaacgttctcatagccttgcttcatagcaagccctggcagggcggcaacgggatgcagtttatgcgctttgcagaacgccaggtaggcttcgtgacgtcgcttaccggttgtcacgtcactgtgcggcacgccgagataactgatattacgatgcccctggtcatacagccgttgcatcaggattttgattgccccttcgtcgtcataacagacgctagcaaagccttttgcgtcacgcgccagcagaaccaggctactctgccagtgggctaacatttcttctgttatgccagtaaaaccgaacagcactacgccgtcgatattacgccgtttcagcactcccaaatgttcggcaactaattgcggggaaaactgactttccatcatgattgggtcgtaaccttgttcatagaacgctggcagcatggtttgaacggcgagattttcactcaagctatccagacgggtaacaatgatggcgaccactttatcgctttgcccacgcatagcgcgcgcagagcgggaaggggaaaatccatgctgattcatcactgcttcaacacgctcgcgggtgagctggctcacgccgctttcgttattcagcacccgggaaactgtagatttccccacgccgcttaagcgcgcgatatctttgatggtcagccgattttgcatcctgttgtcctgtaacgtgttgtttaattatttgagcctaacgttacccgtgcattcagcaatgggtaaagtctggtttatcgttggtttagttgtcagcaggtattatatcgccatagatgctacgaatattattggattctccttattatttgcggcgcttttttcacttaccggaggttatatggaacctgatcccacgcctctccctcgacggagattaaaacttttccggtaagcccgtcttttcacggcgttaccggatgcgtaaggccgtgacgttttaacgtccctgctcagctttattaccttcaggtaaggcttcgccacgcctgaagacatttctgtactgtttcagacagtgcggagggactccttatgtttaaagaaatttttacccggctcattcgccatttaccttcccgtctggttcatcgtgatccattgcctggcgcgcagcagacagtgaatacggtggtcccgccgtccttaagtgcgcattgcctgaaaatggcggtgatgcccgaagaagaattgtggaaaacgttcgacacccatccggaagggttaaatcaggcggaagtggaatctgcccgcgaacaacatggtgaaaataaattacccgcacaacaaccgagcccgtggtgggtacatttatgggtctgctatcgcaacccctttaatattttactcaccattctcggcgctatttcttacgccacggaagatttatttgctgcgggcgttatcgcgctaatggtcgctatttctacgttgctgaactttattcaggaagcacgttccactaaagcggcagatgccctgaaagcgatggtcagcaatactgcgacggtgctgcgcgtaattaacgacaaaggcgaaaatggctggctggagatcccgatcgaccagctggtgcccggcgatattataaaactggcggcgggagatatgatcccggcagatttacgtatcttgcaggcgcgggatctgttcgtcgctcaggcgagcttaaccggtgagtctctgcccgtagaaaaagccgctaccactcgccagccggagcacagcaatccgctggagtgcgacacgctgtgttttatgggcaccaccgtggtgagcggcacggcacaagcaatggtgattgctacaggtgccaatacctggtttggtcaactggcggggcgtgttagtgagcaggaaagcgagccgaatgcctttcagcaagggatcagccgcgtcagtatgctgctgattcgctttatgctggtgatggcaccggtggtgctgttaatcaatggttacaccaaaggcgactggtgggaagcggcgctgtttgcgcttagcgtcgcggtaggcctaacgccggaaatgttgccgatgattgttaccagcacgctggcgcgcggcgcagtaaagctgagcaaacagaaagtgatcgtcaaacatctggatgctattcagaactttggcgcaatggatattctgtgcactgataaaaccggcaccctgacgcaggataaaattgtgctggagaatcataccgatatctccggtaaaaccagcgaacgcgtgctgcatagcgcgtggttgaacagtcattatcagaccggacttaaaaacctgctcgatacagcggtgctcgaaggtacggatgaagagagtgcgcgcagcctggccagtcgttggcaaaaaattgatgagattccgtttgatttcgagcgtcgccggatgagcgtggtagtggcagaaaataccgagcaccatcagctggtttgcaaaggtgcattgcaggaaatcctcaatgtgtgtagccaggtgcgtcacaatggcgagattgtgccgctcgatgacatcatgctgcgtaagattaagcgggttactgatacgctgaatcgtcaggggctgcgcgtggttgcggtggcgacgaaatacctgccagcgcgtgaaggagattaccagcgggcggatgaatccgacctgatcctcgaaggatatattgcttttcttgatccgccaaaagagacaaccgctccggcactgaaggcattaaaagcgagtggaattaccgtaaaaatccttactggcgacagtgagttagttgcagcgaaagtgtgccatgaagtggggctggacgcgggagaggtggtcattggtagtgatattgaaacgctatctgacgacgaactggcaaatcttgcacagcgtaccacgctgtttgcccgcctgacgccgatgcataaagaacgcattgtgaccttactgaagcgcgaagggcatgtggttggctttatgggcgatggtattaatgatgcgcccgccttacgcgctgcggatatcggcatttctgtggacggcgcggtagatattgcccgtgaagcggctgatatcatcctgctggaaaaaagcctgatggtgctggaagagggggttattgagggacgtcgcactttcgccaacatgctgaaatacatcaaaatgacggcgagctctaacttcggtaatgtgttcagcgtgctggtagcgagtgctttcttgcccttcctgccgatgttgccgttacacttgcttattcagaacctgctgtacgatgtgagtcaggtggcgatcccgtttgataacgtcgacgacgagcaaattcaaaagccgcagcgttggaatccggcggatctggggcgctttatgatcttcttcggaccgatcagcagcatcttcgatattttgacgttttgcctgatgtggtgggtattccatgccaacacgccggaaacgcaaacgctgttccagagcggatggtttgtggtgggcttactgagccaaacgctgattgtgcatatgatccgcacccgccgtgtgccgtttattcagagctgtgcaagctggccgttaatgatcatgaccgtgatcgtgatgattgtcgggatcgcattgccgtttagtccgctggccagttatctgcaattacaggcgctgccgttaagctatttcccgtggctggttgcgattctggcagggtatatgacattaacccagttggtgaaagggttctatagccgtcgttacggctggcaataaagaataaactgggcacgatagccccgattcagattgtagacaaagtgagttttgttcatgccggatgcggcgtaaatgccttatccggccaacaaattcaataaattgcaggaatcacgtaggcctgataagcgtagcgcatcaggcgattttgcgtttgtcatcagacttaatccgggcatgatagcccggatttccatcaagattagcgacgaacagcgatcgcttcgatctcaatcttcacgtctttcggcagacgggcaacttcaacgcaagaacgtgccgggaaggtggcgttgtgttcggtgaagaaggcttcgtaagtggcgtttacggttgcgaagtcgttcagatcttttacaaacacggtagttttaacgatgtcgcccactttcaggccagcggcttcgacgatcgcttttacgttatccaggctctgacgtgcctgtgcagcgacgtctgccggtacttcgcccgttttcggatttaccgggatctgaccggaggtgatgatcatattgcccagatcaacgccctgtacgtaaggaccgatagctgccggtgcattttccgtcgcgatagttttgctcatgatttctcctttattacagcggtaaaaagtctggctcattatagggagccagacttttattaccaaccgcaattaattggccagcaccacattatgggaaaactctttttcacagtatttgcatttgagcgcgatatcattggcgcgttttcgcacggcaaagctggaactaaccggttcggcatggctgatacagttgctgttcgggcagaccagcacattgtcgatgcgctccggcagacttgggcggcttttacccaccacttcatagttgtcgatacggttaaccgtggcttgcggcgcatacaatgccagttgatctacttgatcttcactcaaaaaggtattttcgattttgatcagatctttgcggcccatctcgccagaaggcaggttcagaccaatggtgatgcgctgatccgtttcggtcagcttgaacagactcaacagcttaaaaccgatctgggcggggatatggtcaattaccgtgccgcgtttaatagcttcaacctgcaatttattatcgtgtgtcatctctatttccccttacagtaccagatcgcgattcagaaccagtgccagtaacgcctggcgagcgaaaatcccgttgcctgcctgctggaagtaccaggcgtgtggcgttttatcaacatccgtcgcaatctcatcaacacgcggcagcggatgcagcactttcatattggctttggcgttgtggagatcgctggcgcgaagaacaaactgcgctttcacgttggcgtactcggacgggtccagacgctctttttgcacgcgggtcatgtacaggatgtctacttccgccatcacttcttcaatagagctgtgcagactccatgcgatccctttttcatcgagcatatccagaatgtattgcggcattgccagcgcgtccggcgcgatgaagtaaaaacggttgccgtcgaacttcgctaacgcctgagtcagggagtgaacggtgcggccatatttcaggtcaccaaccattgcgacgtggagattgtccagacgcccctgggtttcctgaatagtgaataagtccagcaaggtttgcgtcggatgttggttggagccatcaccggcattcagtaccggtacattgccggaaaactcggtggccaggcgcgccgcaccttcctgcggatgacgcatcactatcgcatcgacgtaagtgctgataacgctaatggtatcggccagcgtttcgccctttttacccagacttgtattggcgctgtcggagaagcccaccacgctggcccccaggcggtgcatagatgtttcgaaagagaggcgggtacgggtagaggcttcgaagaaacagctggcaatgactttgtgcttcaacagctctggttgcgggtttgctttcagtttcgccgctgtcgccagcaccagattaaggtcatcgcgactaaggtcgtttatggaaatgatatgtttctgatatagcggattagccatcttttatctcctgacgcctgggcaaaaaaaagcccctcgattgaggggctgggaatgggtgatcaacgggaagaaaaacggcaggccagcgtcttttttcagacgcggtaagacaaaatgtcgaacacactgaaccatacatcctcccggcaaattgtccggcattatactcatcgtcagaagcggcgcaagcatttgatgcaatattttgtcagcgcaaacggtttatttgaattaaaagtcaaggtatatgcatttttatttgatgtgattctgcaggggaactgtccttcggtatcaataattgcagacattccctgctttttcctttttcactttcacgcaatcagatatgcattttattccattcatccgacttatagggcggagtgtgaaagcgaacggctaacactattgcttactgctcagggatgcgcgctatcactttaatttcaaaatcaaagcctgccagccatgtaacacccaccgccgtccagtttggataaggtggggcgctaaatatttcatttttcaccgtcatgatgtcttcaaattggttttctggatcggtatggaagctcgtaacatcaatgatatcgtcaaaagtgcatcccgcagctgccagggtcgcatgcaaattatcaaatgccagtctgacttgttgctgaaaatcgggttctggtgttccgtcctctcgacttcctacttgcccggaaacaaacagcaaatcgccggaacgaatagccgcagaataacgatgctcagcatatagactatgtcggccagcagggaaaacagcggttctttctaccatttggttatcctcaagatttacgacatgaacagaagatttctctttaccgggagccgcttttagcggacgacgtgagtaaacaaaacccagacatcatggataatggctgggcttaattgagcgtagtcggttatgcgccaaacgcgccatcaatggtatgcatcgcgccggtaacaaaactggcttctggccctgctaaccatgcgaccataccagcgacctcttccggttgcccatgtcttttgatagccatcaaactatgcaacatatcgcgcattggcccgttggcgggattagcgtcggtatcaattggccctggctggacgacgttaatggtgatcccacgcggtccaaaatcacgggccagcccgcgcgccatgccttgcagggcagatttgctggcggcataagcagccatgcctgcaacaggcatacgatcgccattcacggagccgatgattaagatgcgcccgccttcgggcatctgccgggcggcttcaacagaggcatgataaggagcatgaatattgattttgaaaaggcgatcaatatcgtcggcatttaattccagggcctcgccaaagacgccaatacctgcatttaccaccaggatatccaatgcgccgctcttacgaacgacatcaatgacagcgtctctgtcagcactatctgtgaatactgctgtcgctccagtctcttgtgccaggcgtttagcggcatctttgctccccgcataggtgaatcgtacattggccccatcggtgacgaaacgacgtacgatagcggcaccgataccacgactgccaccgaggatgagaactgtcttacctgtaaaagcgcccataaggactccttgatttattatgtaacatgcattacaaaactgttttaactttctgtcaacaggttttgtaatggtcactaaaaaacaatctcgcgttccaggtcgtcccagacgtttcgctcctgagcaggcaatctctgcggcaaaagtgctttttcaccaaaaaggtttcgatgctgtcagtgttgctgaagttactgattatcttggtattaaccccccgagcctctacgcggcttttggcagtaaagctgggttatttagccgtgtactcaatgaatacgtcggtacggaagctattccgcttgccgatattcttcgtgatgatcgtccggtaggcgagtgcctggttgaggtattaaaagaagcggcgcgcagatatagccaaaacggcggctgcgctggctgtatggttcttgaaggtattcatagtcatgatccacaagcgcgtgatattgccgttcaatattatcacgccgcagaaacgaccatttatgactacatcgccaggcggcatccacaacgcgcacaatgtgtgactgattttatgagtaccgtgatgtctgggctttctgcgaaggcacgagaggggcactctatagaacaactctgtgcaacagctgcaatggcgggggaagcgataaaaactattcttgaggagtgatgcgggccttgacccgaaaggcgggaaagcgcctgccgataagttgtgataagacaataattcacgcgttaaggctagcggaattgattatcttttcgtataacgatagaaatgaaacgttgttttaattaaggagtggaaaagatgatcatcggaaatattcataatcttcagccgtggctaccccaggagttacgccaggcgattgagcatatcaaagcacacgttacggcagaaacgccaaagggcaagcacgatatcgaaggcaatcgactgttttatcttatcagcgaagatatgaccgagccgtacgaagctcgccgtgcggagtaccatgcccgctatcttgacattcagattgtgttaaaaggtcaggaaggcatgaccttcagcacgcaacctgcaggcgcgccggataccgactggttagctgataaagacatcgcatttttgccggaaggcgttgatgagaaaacagttattctaaatgaaggtgattttgttgtgttttatccgggggaagtgcataaaccgctgtgcgcagtgggcgcgccagcccaggttcgcaaagcagtagtgaagatgctgatggcgtgatgacttttcgccgtaaataactcaaggtttacggcgagtttgtgaaaagagcgttttttgatatttttttgtgagtaaaatttgtaatgcttagacgttcttattcactcaaggagttcgtcatgagcaaaataagtgatttaaattattctcaacacattacattagccgacaattttaaacaaaaaagtgaagttttaaatacctggcgtgttggaatgaatgattttgcccgtattgccggggggcaggataacagaaggaatattctttctcctggagcatttttagagtttttggcaaagatatttaccctgggttatgtggattttagcaaacgctccaacgaagcgggtagaaatatgatggctcatattaagtccagttcttattctaaagatactaatggcaatgaaaaaatgaagttttacatgaataatcctgtaggggaacgagcggatagtcccaaggtgattatagaaattagtctttccactatcactactatggggactcgtcaaggacatacagccattatatttccacaacctgatggtagcactaaccgttatgaagggaagtcctttgaaagaaaagatgagagtagtttacacctgattactaacaaggttctggcgtgttaccaaagtgaagctaacaagaaaatagcgcgtctattaaataataatcaggagttaaataatctacagaaattaaataatctacagaagttaaataatctactgaagttaaataatatacaggggttaaataatcctcaggagttaaataatccgcagaatttaaatgattctcaggagttaaataacagccaggaattaaatagtccacaggagttaaatgatccgcaggagttaaataattctcaggacttaaataactctaaggtgagttgtacagttagtgttgattctacgattacgggtttattaaaagaaccattgaataatgcattattagcaataaggaacgaacatctgctattaatgcctcatgtatgtgatgaaagcattagttacttactgggcgaaaaaggtatacttgaagaaatagataagctctacgcattaaatgatcacggaattgataatgacaaagtaggtaacaatgaaattaatgacatcaaagttaacctgtctcatattcttattgattccttagatgatgcaaaggttaaccttacaccggtcatcgatagcattctggagacttttagtaaatccccatatattaatgatgtaagaatactggattggtgttttaataaaagcatgcaatattttgatgatactaaaaagataaagcatgcatgctccgtaataaatcatattaatcttcgcagcgatcagtctaaaatagctgagacattatttttcaatctcgataaagaaccctataaaaatagccctgaattacaggggttgatttggaataagttggttgtatatgtcaatgaatttaacttaagtaatcgagaaaaaacaaatttaatacaaaggctatttgataatgttgagtctatatttaatgaagtacctgtcagcattttagtgaatgatatttttatgaatgatttctttatgaaaaatcctgagatgattaattggtacttccctcagttacttaagagttatgagggtgaaaagatttattttgataatttaaaatatgatttaaatgataatgataaggaatctaataaagaaattttgaagaatcaaccagataatgttatcaaagaaaaactgaataatgaatacaaacttagatttagaatgatgcaaactatcttgcaaagcagagttaatgtattaccatatattaatgaacagcgtttaaataaactaaatccaccggaaaatttacgtatagcaatagaacactttgggtggaagaatagacctatcactgcataaaataatgtgatgccgggatggtttgtatttcccggcatctttatagcgatagcaattatttactgagcgtcgcgaccatcaccgctttgatagtatgcatacggttttccgcctgatcaaaaacaatgctggcggcagattcgaagacctcatcagtgacttccataccgccatgtaggccaaattcttccgccattttcttgccaagcgtcgtttggtcgtcatgaaacgcgggcaggcagtggaggaatttgacctccgggttaccggtcaactgcatcatcttgctgttcacctgatattcacgcagcaatgcaatccgttccgcccatttctcttttgcttcccccatgctcacccacacatcggtatagataaagtcagcaccttcaactcccttcgcgacatcttcagtcagcgtaatattcccaccattttgctgtgccagggcgcggcattccgtaaccagcgcagcttccggccagcacgcttgtggcgcgaccagacgcaaatccagaccggtaagcgccgcagcttcgagcatgctattgcccatgttgttacgcgcgtcacctgcatagaccagcgtcatttcgttgaacgctttgccgggcaaatgctcctgcatggtgagaagatccgccagcagctgcgtgggatggaactcattggtcaggccattccataccggcacgctagcgtattccgccagtgtttcgacaatctcctgaccatagccgcgatactgaataccgtcatacatgcgaccaagcacgcgggcagtgtctttaatgctctctttatgaccaatctggctgccgcttgggccgagataagtaacgcgagcaccctggtcatatgcggcaacttcgaaagagcatcgggtacgagtgctgtctttttcgaagatgagcgcgatgtttttaccagtgagtttggcttcttctttaccgcttttcttatcggctttcagcttcgcggctaactgcagcaggctgttgagttcagctggcgtgaaatcgagtaatttcaggaaatgcttatgataaaacccggacatagatccctcctgtggctaacgcctcaatgaattaaaattcaatttatatggatgattattcatttgcaagtctaaagcataaatctttgtcacaaaggtggaggcaatgtcagtggtgtgtgacaataagagtatcggcaggacattaagaggaatgagccatggcaaacccggaacaactggaagaacagcgtgaagaaacacgtttgattattgaagaattactggaagatggcagcgatccggacgcgctgtacaccatcgaacaccatctttccgcagacgatctggaaaccctggaaaaagcagcagttgaagcgtttaaactcggttacgaagtgaccgatccagaagagctggaagttgaagatggtgatatcgtgatttgctgcgacatcctcagcgagtgcgcgttgaatgccgatctgatcgatgcccaggttgaacaactgatgacgctggcagagaaatttgacgttgagtacgacggatggggcacttactttgaagatcctaacggcgaagatggcgacgatgaagattttgtcgatgaagacgatgacggagttcgccactaattaagcgtagcgcatcaggcccaggtagttcctgcaacctggtgaatttgtagcccggataaggcattcatgtcacatccggcataaacaaaacgtacgttgttaatgttcgaatgcccgcgagttgaacacgcgggcatttttttagagttcgcgcaacatccgcacttcacaatcgacatggcccgtgcagccaagcgcatagtcgatatgctcaaagcccaaatgctcataaagcgcaatggcttcctttaaaaaagcggtcgtttccagatagcagcgtttgaaacccatctctcgcgcctgctccatcgccattaaggccagtttttttgccagccctttgccgcggatagccggaagaaaatacatcttttgcagttcgcaaatatcgctctcactcccggttaatggcgctatcccaccgccgccgaccacttcaccctcgtactcaacgacccaatatgcatggccaggctgactatatacttgatacagctcgtcaagattcggatcggcgacggtgtagcctttatcagcggtaagaccgtattcggcggatacctgacgaatgacgcgggcgatagcaggattatcctgcagcgtcaggcgacgcattacaggactttgcggcgcaatgttattcatagtttaacccaataaaaataaagtaattatacatttgtttaataccactctcttcttacgtacgcaagcgacttataaagtaataaagtttttgccagcctattactgataagagtattgtaacgtggcagaacattttactgtctgtatatataagttatatcaatggattttttaattcagggaatttttatggctcaagttattaatgaaatggatgttccgtcccatagctttgtttttcatggtacaggtgagagatattttcttatttgtgtggtgaatgtgttgttaacgattataacgctaggtatctatttaccatgggcattaatgaaatgtaagcgttatctttatgctaatatggaagttaacggacaacgattttcttatggaattaccggtgggaatgtttttgttagttgtcttttttttgtttttttctatttcgcaatcttaatgacagtgagtgcagatatgccgcttgttggttgtgttttgactttgttactgttggttttgcttatatttatggcagcaaaaggactgcgtcatcaggccttaatgaccagtctcaacggcgtaagatttagttttaattgctctatgaaagggttctggtgggtgacctttttcttgccgattttaatggccattgggatggggactgttttctttatcagcacaaagatgctacctgccaatagtagtagtagtgttattatatccatggttctgatggcaatagttggtattgtttccattggtatttttaatggtactttatatagtctggtaatgagttttctctggagtaataccagtttcggtatacatcgtttcaaggtgaaattagatactacgtattgtataaaatatgccattctcgcatttttagctttattgccttttctcgctgttgctggttatattatcttcgatcaaatattaaatgcgtatgatagttctgtatatgcaaatgatgacattgagaatttacagcaatttatggaaatgcaacgtaaaatgataatcgcgcagttaatctattattttgggattgctgttagcacaagttatttaacggtgtctttgcgaaaccattttatgagcaacctgagtctgaatgatgggcgtattcgttttcgcttaactttaacgtaccacggtatgctttatcgcatgtgtgcgttggtggtgatatccgggattacgggcggtctggcttatccactgctgaaaatatggatgattgactggcaggcaaaaaatacgtatttgctgggcgatttggatgaccttcctttaatcaataaagaagaacaaccagataaaggcttcttagccagtattagtcggggagttatgccttctttaccatttctgtaagagataaaaaaggccggagcatgctccggccttcgttttcatcactgtgttttgattacagcgcggcgataacagcctgctgttcaatcagtttcgctttcgcttccgcatagccttccagcttctcacgctctttcgcgatgaccgcttccggtgcgcgggcgacaaagccttcgttcgccagtttgttctcgatacggctgatttcaccttcaatcttcgccacttctttcgccagacgcgccagctcatcttctttgttgatgaggccagccatcgggatcagcagctctgcaccgtcgatgatcttcgtaacggaaaccggacctttgtcatcggcaggcagcacggtgatactttccagacgcgccagggtttgcaggaagccacggttttcatttacgcgacgttctgcatccgcgctgcaaccacgcagcagcagctccagcggtttgcccggcgcgatgttcatttctgcacggatgttacgtaccgcaacgatcgcctgtttcagccattcggtgtcggccagtgcggcttcatcaacctgagatgcatcgtactgcgggaacggctgcagcatgatggtgtcggcagtgataccgcaaagtactttcacacgctgccagatggtttcggtgatgaacggaatgatcggatgcgcgaggcgcagcagaccttccagtacagtcaccagcgtatggcgagtaccgcgcagttctgcttcggtgccaccgttcattaccggcttggtcagctcgagataccagtcacagaactggttccaggtgaactcatacagaatgcctgcggcgatatcgaagcggaagctgtccagcgcttcgcggtacgctttgatggtctggttgaactccgccagaatccagcggtccgccaggctcagcgtcatttcgccgccgttgaagccgcaatcctgaccttctgtgttcatcagcacaaagcggctggcgttccacagcttgttacagaagttacggtaaccttccagacgcttcatatcccagttgatgtcacgaccggtagacgccagcgccgccagggtgaagcgcagcgcgtcagtaccgtgcggctcaataccgttcgggaactgcttctcggtgcgcttacggattttgtccgccagctgcggctgcatcatattgccggtacgtttttccagcagttctggcaggctaataccgtcaaccatatccagtgggtcgataacgttacccttggatttggacatcttctggccttcgtcatcacgaatcaggccggtcatgtaaacggtgtggaacggcacctgcggtttgccattttcatctttgatgaagtgcatggtcatcatgatcatgcgggcaatccagaagaaaatgatgtcgaaaccagataccatcacgctggttgggtggaactgacgcagggcgtcggtattttccggccagccaagggtagagaaggtccacagcgcagaagagaaccaggtatcgagaacgtcttcgtcctgacgcaggacaacatcagcaccgaggttattttctttacgcacttcgtcttcgttgcggccaacataaacgttacccgcttcgtcataccatgccgggatacggtgaccccaccacaactgacgagagatacaccagtcctgaatatcgcgcatccaggagaagtacatgttttcgtactgcttcggtacgaactgaatgtcgccgttctcaaccgcttcaaccgccggtttcgccaggacatcggcacgcacgtaccactggtcggtcagcattggttcgataactacgccgccacggtcgccgtaaggaacggtcaggtcgtgcggtttaatttcttccagcaggccaagcgcgtcaactgcggcaacgactgctttacgtgcagcaaaacgctccagtttctggaactctgcagggatttcgctggaataaacgtcagattcgttacctttggtatcgaacacctgggcgctttcacggatatcgccgtcaaaggtcaggatgttgatcatcggcagggcgtgacgtttacccacttcatagtcgttaaagtcgtgcgccggagtgattttcacgcagccggtgcctttttccatgtcggcgtgttcgtcgccaacgatcggaatacgacggttaaccagcggcagaatgacatatttgccaatcagatctttgtaacgcggatcttccgggttaacggctacgccagtatcgcccagcagggtttctggacgggtagtcgcgaccaccagataatctttaccgtctgcggttttcgcaccgtcagccagcggatagcggatgtgccacatgctacctttgctttcgcggttttcgacttccaggtcagagatagcggtgcgcagtttcggatcccagtttaccaggcgtttgccacggtaaatcaggtcttctttatacagacgaacgaaaacttctttcaccgcattggacaggccttcgtccatggtgaagcgttcacgctcccagtcgacggagttgccgagacggcgcatctgacgggtaatggtgccgccagattccgctttccattcccagattttgtcgatgaaagcttcgcggccgtagtcgtgacgggttttaccttcttctgcggcaatcttgcgctcaacgaccatctgggtagcgatcccggcgtggtcagtaccgacctgccacagggtgtttttgccctgcatgcgctgatagcggatcatggtatccatgatggtttgctggaaggcgtgacccatatgcaaactgccggtgacgttcggcggcgggatcatgatgcagaaactttcctggctttcatcgccattaggcttaaagtagccctgcttttcccagtgctcgtaaagcggctgttcgatatcttgtgggttatatgtcttttccattatttccaggttgccgtattcaggttgaaaccagccacgcggtaggctttatagcgttcgcgcgccagttgtttcagagaatcttcataaggaacgaagtctaccacttctgtgaaagcggtggcaaaatctgcaaagcttgttcgcagactaatcaatatatcgcgccggctgctgctacgcttttgcggccaggcgatctccaccggtgcaccgccgcgcggtccttctcccgctaaattatgcggaacaaagctttctgccggacgcgcccacagggcttcatccagccggtaagcctgcttttcatcttcacaggcgatgagcacgcgcttaccgctgcgccaacgttctgcggcaatttcacacaccagttgctcaacggcgcttaagccatcgacggtggtgtcattgtccagaaggtagaacgtcgcgtttttcataaatggggcttcttgtggtggatttaaatacgcatcaggtatacaccgcagcgcctgatgcgacgctgttgtgtcttatcaggcctacgagttcagtgctgtgtaggtcggataaggcgttcacgccgcatccggcaataacagccttgcctgacgcaattactcttcgccgttaaacccagcgcggtttaacaggaactgtgccagcaacgctaccggacgaccggtggcgccttttgctttaccagaacgccaggcggtaccggcgatatccaggtgcgcccagttgtacttacgggtaaagcgactcaggaagcaacctgcggtaatcgccccaccaggacgaccgccaatgttcgccatatcggcaaaattggactccagttgttcctgatactcgtcacccagcggtaagcgccatgcgcggtcaccggattgttcagacgcggcaatcagttcatgggccagcggattatggttcgccatcagaccagtaatatgatgacccagcgcgatcacgcaggcaccggtcagcgtcgccacgtcaatcaccgcttccggctcaaaacgctcaacgtaagttaacacgtcgcacagtaccaggcggccttcagcgtcggtgttcagcacttcaacggtttgaccggacatggtggttaacacatcgcccggacgataggctcgtccgccaggcatgttttcgcagcctgccaacacgccgataacgttaatcggcagttgtagctccgcgaccatccgcatcacgccgtaaaccgctgccgcaccgcacatatcgtacttcatctcatccatgccttcactaggcttgatgctgataccgccggagtcgaaggttaaacctttacccaccagcacgattgggcgtgcatcttcgctcgcgttgcctttgtactcaatcacgctcatcaggctttcgttttggctaccctgaccgaccgccagataggaatgcatccccagctctttcatctgctgttcgccgataacgcgggtgatgacattcttgctgtagctgtcagccagctggcgcgcttgactagcgaggtaagcggcgttacagatattcggcggcatattgccgagatcttttgctgctttaatcccggcggcaatcgccagaccgtgctggatcgcgcgctcaccgctggtcagttcacggcgggtcggcacgttgaacaccatcttacgcagcggacgacgcggttcgctcttgttcgttttcagctgatcgaaactgtagagcgtctcttttgccgtctcgacagcctgacgcactttccagtagttgttacggcctttaacgtgcagctcagtcagaaagcagaccgcttccatactgccagtatcattcagcgtattaatggttttctgaataacctgcttgtactgacgctcatccagctcacgttctttgccgcaaccaataaggagaattcgctcggaaagtacattcggaacatggtgcagcaacaatgtctgccccggttttccttccagttcgccccgacgtagcagggcgctgatgtacccatcgctgattttatcgagctgttctgcaatcggagaaaggcgacgtggttcgaagacgcccacgacgatgcaggaactccgctgtttctccgggctaccgctttttacactaaactccatgcactacgctcctgaatcttaaagacaacggcggtggctacagatagaattgcaagctttcgtaactcatgtccgctgttgcgatgacttcgtgttaatcttaacgttattacggcattggcacgtcagaacaaaatctgagaggtgaatccgttgagtataattatcttagcgacgatttcgacgactcaagagaataaatgacgtttaagccatgaaacaagctaaaatcctgcaaaagacgagtttttacgggcgtatttaaagtgataatcataagatatctggtgcgggagacgctcaaaagccagctggcgatactcttcatcttgcttttgatcttcttctgtcaaaagttagtgaggatcctcggcgcagcggttgacggcgatattccggcgaatctggtgctctcccttctcgggttgggcgtgccggaaatggcgcagcttatcctgccattaagcctgttcctcgggctgctgatgacgctgggcaaactgtataccgaaagtgaaattacggtaatgcatgcctgcggcctgagcaaagcggttctggtgaaagcggcaatgatccttgcggtattcacggcaatcgtagcggcggttaacgtgatgtgggcgggaccgtggagtagccgtcatcaggatgaagtgttagcagaagcgaaagcgaaccctggcatggcggcgctggcgcaagggcaattccagcaagcgactaatggcagcagcgtgctgttcatcgaaagcgttgacggcagcgatttcaaagatgtgttcctcgcgcaaattcgaccaaaaggtaatgcacgtccttctgtggtggtggccgattccggacatttaacccagctgcgcgacggctcccaggtcgtcactctcaaccagggaacgcgcttcgaaggcactgcattgttacgtgatttccgcattacggacttccaggattatcaggcgatcattggtcaccaggcggtggcgctcgacccgaacgataccgaccagatggacatgcgcacattgtggaacactgacaccgatcgtgctcgcgcagaactgaactggcgtatcacgttggtattcaccgtgtttatgatggcacttatggtcgtaccgctgagcgtggttaacccacgtcagggacgcgtactgagcatgctgccagccatgctgctgtatctacttttcttcctgatccagacctccctgaaaagcaacggcggtaaaggtaagctggacccgacgctgtggatgtggaccgttaacctgatttatctggctttagcgattgttctcaacctttgggacaccgtgccggtccgccgcctgcgcgccagttttagccgtaaaggagcggtgtgatgcaaccttttggcgtacttgaccgctatatcggtaaaactattttcaccaccatcatgatgacactgttcatgctggtgagcctgagcggcattatcaagtttgtcgatcagctgaaaaaagccgggcaggggagttacgacgcgttaggcgcaggaatgtataccttgctgagcgtgccgaaagatgtgcagatcttcttcccgatggcggctctgcttggggcgttgcttggtcttgggatgctggcgcagcgcagcgaactggtggtgatgcaggcttctggttttacccgtatgcaggtggcgctgagcgtgatgaaaaccgccattccgctggtcttgctgacgatggcgattggcgaatgggtcgcgccgcagggcgagcagatggcgcgtaactaccgtgcgcaggcgatgtacggcggcagcttgctctctacccagcaaggcttatgggcgaaagatggcaacaacttcgtctacattgagcgggttaaaggtgacgaagagttaggtggcatcagcatttatgcctttaacgagaatcgtcgtctgcaatccgtacgctatgccgctactgcgaagtttgacccggaacataaagtctggcgtctgagccaggttgatgaatctgatctgaccaatccgaaacagattaccggtagccagacggtgagcggcacctggaaaaccaacctcacgccggacaaactgggcgtggtggcgctggacccggatgcactctctatcagcggtttgcacaactatgtgaagtatctgaagagcagcggtcaggatgccggacgttatcagctcaacatgtggagcaaaatcttccagccgctatctgtggcggtgatgatgctgatggcgctgagcttcatctttggcccactgcgtagcgtaccgatgggcgtgcgtgtggtcaccggtatcagtttcggttttgtcttctacgtactggaccagatcttcggcccgctgacgttggtttatggcatcccgccgatcatcggcgcactgttgccaagcgccagcttcttcttaatcagcctgtggctgttaatgagaaaaagctaaccgaatgaacgaataaagggagcgaaagctccctttattattgttagcaaagtgtgcttcgttcattcctgaaaaataattaaaattcaatatattgcagtggggtgggcatgataagacgcgccagcgtcgcatcaggcaaagacaaatctcgcctgacttaccttcttctcccccccagcaaactccccaacatcccgcgtacaatctgattcgtcacttggcgagcggcgcttttggccattgtttgcaccacaccatctttcttcccgccgcgtggtccggtagtgccgaacaaaatatccttcaatccaccaagaatgccgtcatccaccgctacctctttccctttcgcgggaggattattttgctgctcggtactggcctgaaagcctttttgcaacatctcataggcggattcccggtccacctcatcctcatatttgccatacaccggagagtgattaatcaagccattacgctcatcttccgtcaccggccccatccggctacaaggcgcgatcaccatcgcacgctccaccacagaagggcttcctttcgcatccagaaaagagatcaacgcctcgccggtgcccagttcctgaatcgccttttcggtatcaaacgccggattggcccgcatggtttgcgccgctgccttcactgctttctgatcttttggcgtaaaagcccgcaaagcatgttgaacgcgattaccgagctgcccgagcacattatccggaatatcagacgggttttggctaacgaaccagacgcccacgcctttactgcgaataagccttatcacctgctcaatcttatccagcagtacctgcggggcatcgttaaacagcagatgtgcctcgtcgaagaaaaacaccagttttggtttctccagatcgcccgcttccggcaattgttcatacaactcactaagcatccacagcaggctggcggcgtacagtttcggcatctgataaagtttctcggcgctgaggatattgataacgcctttaccgttggcatcggtgcgcatccagtctttgatatccagcatcggctcaccaaagaagtgtgctgcgccttgctgttccaggctcaacagcccgcgctggatggcaccaacgcttgcgctactgatattaccgtactgattctggaaggatttggcgttatcgccgatgtactgggtaattgcccgcagatctttaaagtcgagcagtaacagcccctgatcgtcagcaatgcggaagatgatattcagcacgccagattgcacatcgttgagattcaacagtcgtgccagcaacagcggccccagatcgctaaccgtcgcccgcaccggatggcctttctcgccaaagatatcccacaccaccaccggattggcatgcggttgccagtcattgacgccgatatttttaagccttgcgagcagtttttcgctcaccgttcctgcctgcgcgacgccggtcagatcgcctttcacatcagccataaacaccggcacgccgatttcgctcaaactctccgccagtttttgcagcgtaacggttttacccgtccccgttgcgccggtaatcagcccatgacggttagccattcccggcagtaaaaacagttctgtgtccggcgtgcgggcaattaacaggggttcactcatgagatatcctccagtttcctgcctggagtataggcaacgtccggcaaagagaatacgtgtaatgaagagaaaataacttaaagcgtgttgccgtgataaatctgatacccgaggtcaacagtgttgtggttgtgatcgttatttttaattttgctcagcaacatttgggcggccatccgaccaatatcaaaacggggagtaattacgctggcgaggcttgggatcatttgcctgccaatctccagcccatgaaaacccgcaatggaaatttgttctggcacggcgaggtttcgctcgcggcacagcagaagcgcacccatcgcaatatcgtcattggtgcaaaatacaccgtctaaatccgggtttgcgctaagggcatcacgcattaactgcattcctaaatgaatggaactgatggcgcgtggattcatgcgtaatggggaaagattatgcagcatcatcgcatcgcaatacccctgataacgctgttcatcgcgggtgtcatctttggaaccgagatacagaattttgtgcctgactcgcttctccagcatggtacacaccatgtcaaaagcggcctgccgattatcaaaaccgacctccatatccagccgttctccctgtacatccatcaattccacgaccggaatggtggcactacgcagaaatttcaccgtcctgatggtgtgatatttttcgctaagtataatcccgtcaatgttataagagagcaggttaatcacgctctcttcttcggaatcgcgatcgtaattgtaattagcaataagggtctgataattatgctcagaggtgacggattctattcccgcgagaatgtcagcgaagagttgattttgaaaactcggaatcaagataccgagggtataactttgtgcattcaacaacatgccgggagcgcgattagggatataattgatctcttccataattttggcgatgcgctcgcctgtttcctttgccacctttttcgggctgcggatataacgactcacggtcatttttgttacgccagccagcgtagcgatatcctgtaaagaaattctgtgattgcgcataacttctcccaacgtcgggggaatcttcaatcttcccccgaaactacatcacaatattttattctttcagtgcaatacggcgttaatggctaacacgcccagcaaacccataatagaaataagggtttccatcaccgtccaggtacgcaacgtttcaccaaccgtcagattaaaataccctttaaatagccagaagccagggtcgtttacgtgactcgcgatcacgctgcccgcaccggttgccagtaccattaaagcgggatcggcatgggtaacgttgataatcggcaacaccacacccgcggtggtaatggccgcgacggtggcagagcccagagcgatacgcaacagcgccgcaacagtccagcacatcaataacgggctaagtgtagttccggtcattaagtgactaatatagtgcccgacaccgctatctactaatacctgcttaaacgcgccgccgccagcgataataaacacaatcatcgcgatagcgcctatagaatccccaatgatatccatgatttgctcgatggtgcgtccattacgtcggcccagtgtgaaaatcgcaataacaatggcaataaacagcgcaacggcagggttaccgacaaattcaaagaagaggcgcacggtgttagttttcggtaacgtaatttcacaaacggcggcgatagccatcaggatgaccgggatcacggcagcgaaaatactgttccagaaggagggcatctcctcttcgctaaacagatgaggattaaataagccttccggtggtgctttctcaaagcgagttagcagtttagaaaacagcggtcctgcgacaataactgtcggaatggtaatgataaatccatacagtaaagtcgttccgagattagcctcaaagatagtcgcgatggcagtaggccctggatgtggcggcagaaaacagtgggttacagagagcgctgctaccattggtacgccaacatacaacaggggtaatccactacttgctacgatggtaaataccaacggcaacagcaggacaaaacccacttcaaaaaacatggcgaggcccacaaccagaccggtgatcactagcgcccattgcacgcgttttttaccaaaagtagcaatcagcgtagtggcgatacgttgtgccgcacccgtatcagaaatcagcttgcctaacatggccccgaaaccgaggatcattgccagcccgccgagcgtgctgccgataccattttgtatagagtgcaggacggcctgtgcatccatcccttcggcaaatccgacgacggcagctaccagaacgagggcaataaagccgttaactttaaagccgatcatcaggataagaagcagcgcgacgcctgccgcaataatgattaatggcatagtctttatctcttattagtgccagaaaagcagcgctttcgcgctgcacgtaggggggctgttaaacagccactaacatgccgccatcaacaaacaacaggtggccgtttacgaaatcagaggctttactagaaaggaacaccgcagcaccaatcagttcctgcggatctccccagcgtgcggcgggggtccgtttgcacaaccaggcggtgaaggcttcgtcctcaaccagtgctttagtcatttctgttttgaaatagcccggcgcaataccgttgacctgaatattgtggcgcgccagctcgacgcacatgccgcgggtgagcatttttaccgcccctttgcttgcggcataaggggtgatggtgtcacgtcccagttcgctttgcatgctgcaaatattaataactttacctgccttgcgttcaaccatgtgacgagttaccgcttggcttaccaggaacacggcggtctggtttactgcgatcacatcattccactcttgttcagggaactcagtaaaaggatgacggcgctggataccggcgttattcaccagcacatcaatggggccgatgtccttttcgatatgttcaacggcggcatcaatttcatgtttatgagtaacattaaaaggtgcggcaacggcctgaataccctcctggtggagtttttctacagcaagttctgcgcgttcggcagtaatatcattaataattatttgtgcgccatatttacccaggccggttgccagtaaaaagccaatgccctgtgcactaccggtaatcaagatattttttcctgccagactaaatagatcgttcattgtattattcctttatttatctcttagaaaacaagctggacttttgctgcctgggttttatcaccggcgaaacgtagcgcctcttccaggtcagtgaagggatattcagcactcagtaaaggcagtggattgataacgccattcgccagccaactcactgcggtattaaattcgctggtaaaacggaaagagcctctgagactaatctccttaccaatcaacgtcatcattgggaattctgccatcgcgcctcccatacctacctgcaccattacgccgcgtgcacgagtgacctccagacaggtattcacactactaggatgaccggacacttcaaagctgacatcgaaatagcctttttccgctttccagtgatccatgtcgtcgttttgtgggtttacgagcacatccgcccccatctctttgcccaggctaagggaacggggactcacatcagcacagacaatttccgcggcccccagtgttttcactgcactgacaatcaggcagccaatgggtccaacaccggaaataaatactcgcttgccctgtaactcgccggcctgatgtgcggcatgaatcgcgacggctaaaggttcggcaaaagccataaccttttcgtcagctttggccggataagggacacattggctcgtttcgaccattttataacgggtaaaaccaccatcaacatgagggaaatacatggcactgccaaaaaaacgcatatctgtacactgattctcgttatgttcaatgcagtatttgcagtgaccgcacggtttagacggattaatggctaccgtttgcccttcatgtaattcactactgtcgctatgaataactttaccgataacttcatgacctaacaccatcggtgcctttatcatgaaattacctacttttccttcctgataataatgtaaatcggaaccgcaaattccacctcgggttatttgtactaatgttccattattattccaatctatcgtctgctcggtaacggcaacagttttcttgcccgcaacaacgcaggactgtgttttcacttgcataaattcctcactggtcaggtagacacctcggaagcatttaagcggttttaactgtcattatttgtgatgaagatcacgtcagaaaattgttacattactatgttacgcataacgtgatgtgccttgtaattcttatcagtagaaataaaaaaacgtgaaattattatgccgccaggcgtagtatcgcagcaggtaagatgattcaggagattttaaatggcgggtgaaagctttattttgatgggcgttagtgggagtggtaaaacattaattggtagcaaggttgccgcgttattatctgctaaatttattgatggtgacgatcttcatccagccaaaaatatagataaaatgagccagggtattccattatctgatgaagatcgacttccctggctggaacgcttaaatgatgctagttacagtctttataaaaagaatgaaacaggatttattgtctgtagtagtttaaaaaaacagtatcgtgatattttacgcaagggtagcccccatgttcatttcctctggttagatggcgactatgaaactattctcgcgcgaatgcagcgtcgggctgggcattttatgccggtagcgttactaaaaagtcagtttgaggcactggagcgtccacaagcagatgaacaggatattgtgcgcattgatatcaaccatgatattgccaatgtcaccgaacaatgtcggcaggctgtgctggcgatacgacaaaacagaatatgtgcgaaagagggcagcgccagtgatcagcgctgcgaatgattttcaaaaatcggctttcaacaccacgcggtaacgcgccttaccgtcgcgcacatgctggatggcgtcgttaattttgctcatcgggaacagttcggtggtcggcgcaaccttgctgcgggcggcaaaacgcatcagcttacgcagctcataaggcgtgccggtagcagaaccagagacgctgcgatcgcccgcaattaacgtaaaggccggaacagacagcggcgtgagaaccgcaccgaccgtatggaaattaccgccataggtcagcgcctcaaaatagggctgccagtcgaggctgacgttgacggtgttgataatgagatcaaactgccccgccagtgctttcagtgcctgcggatcgcggctattcaccactttatcggcacccatcgccagcacttcctgctctttcgccggattagaactaaaggctgtcacctcgcatcccattgcgtgcagaagttttatagcgatatgccccagcccgccaataccaattaccccaacgcggctggtagcagtgatatggtgcatcaacagtggtttaaagaccgtgataccgccgcacaacagcggcccggcggactcgatatcaatattttctggcagtggaatcacccattgccagtccgcacgcaacttctcggcaaagccaccgcgattcataatcgtcggcaccgcaccttgctcgcagttgatctgattaccgctaatacaggcgtcgcagtgaccacagctacgcgccgtccagccaatcccgacacgctgaccgacctgcaaacctttatcctgcgcggcgctcccgagtgccaccacgcgcccaatcacctcatgcccggcaaccagcggatattgactaaatccccattcgttatcgatcatgctcagatcggaatggcagatcccgcagtaatccacctgcacttcaacatcttgtggcctcagctcaccgggatcgtactcataaacttccagttcgccgcccgcttcttttgcggcatagctttttatcatgctcattttttggtccttctctggtgttgtttgggaagtgtagagcatggcagggcggggtgcctggagtgtgacaaaggttacacatcgctgtatgcaatgctgaaaatttcagcacttagcgaggtgcgagcaagctggcgcttgcatggtggcgtgcgacaggtataatccacaacgttttccgcatacctcttcagtgccgaagtggcgaaatcggtagacgcagttgattcaaaatcaaccgtagaaatacgtgccggttcgagtccggccttcggcaccaaaagtatgtaaatagacctcaactgaggtctttttttatgcctgaaatccagtgtttatctatctttcccgctatattaactctctcaaggtcaaccgatatcaacgtacatctaccaacatatgttggtacagatgatggtatttccggttcgataatgcttgtaccaacagggagggaatacgagaaatcacaggacattgctaatgctggtacgcaatattacctgaagctaaaaacctgcacgttagccctttgtaggccagataagacgcgtcagcgtcgcatctggcataaacaaagcgcactttgctggtctgttcccctcaccctaaccctctccccggaggggcgaggggactgtccgggcacatttttagactttgtcatcagtctgagcctgccattggcaggctctggtgtccttttacgctaccatgctaataatcagcacaataatcagcccaaccacggagttgaccagctccagcagaccccaggttttcaacgtgtcttttacactcaggtcaaagtaacctttgaacaaccagaaagatgcatcgttaatgtgggtgagggtgttggaacccgcagccgtcgccagtaccagcagcgccggattcacgccaaccagctgaccagttgctggatctaggattgcagcactgataatcccggcggcggtcatcgcgctaacgacaccctgacccgtcgccagacgaattagcacagtgatcagccatgccatgatgtaggggctgatattgccgtgggacatcaacatgccgatggtgtcgccaatgccggtgtcgatgatggtctgcttcagcacgccacccgcaccgatgatcagaatcaccattgcaatactcttcaccgcgctttcaaaagcgttcatcacccactgcatgtcatgaccacgtgcggtgccaaagagtacgaatgcaaccaccatcgcaataaacattgcaatcgggctggaaccgataaagttaaccacttcccaggcaggggtatcttttaccagccagatattggcgatggtggtagagatcataatgatcgccgggatcagcggcaccagaatgctaacgccgaaagagggcagattattcatatctaccggttgatctgctttcaggaaacttggcgttgggcgctcaagattgccgaggaacttcggcaggatcagacctgcgcagattacacttgggatcgtcaccagtacgccatagatataaaccatccccatatccgcgccataagcattcaccagcgccaccggacccggctgcggtgggaacagactatgtgcggtagtggcagctgctactgccgggatcgccagtttcaggaacggaattttagcttcggcggcaataacaataaccagcggcgctaacatgataaaggccacttcatagaacatcgccagaccaaaaatcaggccgatgataatcacgctcagctgtacatagcgcagaccgagacgcgccagcagcgtatgcgctatctggtgagccgcgccggagtcgaccatcaatttaccgatgaccgcaccgaacaccacgatgatagccagttcccccagcgtgttgccgaagcccgctttcatagtgtgcagcaggctcatcaaatccatgcccgccagcatcccgacggacagcgccgccaccaacaaagccaccatactattgattttgaacttcaaattcagtaccagcatcagaccaatgccgaataccacccagagaatgttaagcacatgcataacgttttaccttacctggttgaaccgttgttattttgggcgatatgttatgtaaattggtcaaccattgttgcgatgaatgtcacatcctctgatcaataaccatcgattaccctttgctgcaatttgcagcaacaaccatgagagtgaaattcttgtgatgtggttaaccaatttcagaattcgggttgacatgtcttaccaaaaggtagaacttatacgccatctcatccgatgcaacgccacggctgcggtctggttgttcatccggatacctaaacaactccagggttccgcgtctctttgctgtggaacccactatgtgaaagaggaaaaatcatggaacagacctggcgctggtacggcccaaacgatccggtttctttagctgatgtccgtcaggcgggcgcaactggcgtggttaccgcgctgcaccatatcccgaacggcgaagtatggtccgttgaagagatcctcaaacgcaaggcgatcattgaagacgcaggcctggtgtggtctgtcgtagaaagcgtgccaattcacgaagatatcaaaacccacactggcaactatgagcagtggatcgctaactatcagcagactctgcgcaacctggcgcagtgtggcattcgcaccgtgtgctacaacttcatgccggtgctcgactggacccgtactgacctcgaatacgtgctgccagacggctccaaagctctgcgcttcgaccagatcgaattcgctgcattcgaaatgcatatcctgaaacgcccaggcgcggaagcggattacaccgaagaagaaattgctcaggcagctgaacgcttcgccactatgagcgatgaagacaaagcgcgtctgacccgtaacatcattgctggtcttccgggcgcggaagaaggctacaccctcgaccagttccgtaaacacctggagctgtacaaagatatcgacaaagcgaagctgcgcgaaaactttgccgtcttcctgaaagcgattattccagttgctgaagaagtcggcgtgcgtatggctgttcacccggacgatccgccgcgcccgatcctcggcctgccgcgcattgtttccaccattgaagatatgcagtggatggttgataccgtaaacagcatggcaaacggttttaccatgtgcaccggttcctacggcgtgcgtgctgacaacgatctggttgatatgatcaagcagttcggtccgcgtatttacttcacccatctgcgctccaccatgcgtgaagataacccgaaaaccttccacgaagcggcgcacctgaacggtgacgttgatatgtacgaagtggtgaaagcgattgttgaagaagaacaccgtcgtaaagcggaaggcaaagaagacctgatcccgatgcgtccggaccacggtcatcagatgctggacgacctgaagaagaaaaccaacccaggttactccgcaattggtcgtctgaaaggcctggccgaagttcgcggtgtcgaactggcgatccagcgcgctttctttagccgttaatatccaccggcatggctgcgcgccgtgccggttccttcttccttgccgtcactctttgaagacggattctggagtttacgatgactactattgttgacagcaatctgccggttgcccgcccgagttgggatcattctcgtctggaaagtcgcattgtgcatctcggttgcggggcgtttcaccgcgcgcaccaggcgctgtatacccatcatctgctggaaagcaccgacagcgactggggcatctgcgaagttaacctgatgccaggcaacgaccgcgtgctgatcgaaaacctgaaaaaacagcaactgctgtacaccgtagcggaaaaaggcgcagagagcaccgagctgaaaattatcggtagcatgaaagaagcgctgcatccggaaatcgatggctgcgaaggtattctcaacgcgatggcgcgtccgcaaacggcgattgtctctctaacggtcacggaaaaaggctactgcgctgatgcggcaagcggtcaactggatctcaataacccgctgatcaagcacgatctggaaaacccgactgcgccgaagtccgcgattggttacatcgtcgaagcgttgcgtctgcgtcgtgaaaaagggttgaaagcgtttacggtgatgtcctgcgataacgtgcgtgaaaacggtcatgtggcgaaggtcgcggtactggggctggctcaggcgcgtgacccgcagctggcggcatggattgaagaaaatgtcaccttcccgtgcaccatggttgaccgcatcgttccggcggcgacgccagaaaccttacaggaaattgctgaccagctgggtgtttacgacccgtgcgccattgcctgcgaaccgttccgtcagtgggtgattgaagataacttcgttaatggtcgcccggattgggataaagtgggcgcacagttcgttgcagacgttgtgccgttcgaaatgatgaagctgcgtatgctgaacggcagccactcttttctggcgtacctcggttacctcggcggctatgaaaccattgccgacaccgtgactaacccggcttatcgcaaagcggcctttgccctgatgatgcaggaacaagcgccaacgctgagcatgccggaaggtacagacctgaacgcctatgcgacgctgctgatcgagcgtttcagcaacccgtctctgcgtcaccgtacctggcagattgcgatggacggcagccagaagttaccgcagcgtctgctggacccggtgcgtctgcacctgcaaaacggcggcagctggcgtcacctggcgctgggcgtggctggctggatgcgttacacccagggcgtggatgagcagggtaatgccattgacgtggtcgacccgatgctggcggagttccagaagatcaacgcgcagtatcagggcgcagaccgcgtgaaagcgctgctgggcctgagcggtatttttgccgatgatctgccgcagaatgccgactttgttggcgcagtgacggcggcatatcagcagctgtgcgaacgcggtgcgcgcgagtgtgtggctgcgctgtaactaactgattaccctacagacttactggtcaatcaaactgatatttggttgaccagttttcgtttttttgcccacctgtacgtgccaacttccagtgctaatggtatagtttgagattaacgggggccgtaaaattgcccgttgtaggccggataaggcgttcacgccgcatccggcaaaaatttgattaaccgcacctaacggacacaacaccatgaaatctgccacctctgcgcaaagaccttaccaggaagtcggggcgatgatccgcgatctgatcataaagacgccgtacaatcctggcgaacggctgccgccggagcgtgaaattgcagaaatgcttgatgtcacgcggacggtggtacgtgaagcgctgatcatgctggagatcaaagggctggtggaagtacgccggggtgccggtatctatgttcttgataacagtggcagccagaacacagacagtccggatgccaacgtctgcaacgatgccggtccttttgagctgttacaggcgcggcagttattggagagcaacatcgccgagtttgccgctttgcaggctacccgcgaagatatcgtcaaaatgcgtcaggcattgcaactggaagagcgtgaactggcttccagtgcgccgggcagcagcgaaagcggtgacatgcagttccatctcgctattgccgaagcaacgcataacagcatgctggtggagctgttccgtcagtcctggcagtggcgggaaaacaatccaatgtggatccagttgcacagccatctggatgacagcctgtatcgcaaagagtggttgggcgatcacaaacagatcctcgccgcgttaatcaaaaaagatgcccgagcggcgaagctggcaatgtggcagcatctggaaaacgttaagcaacgtctgctggaattcagcaacgttgacgatatttattttgatggctatctgtttgatagttggccgctggataaagtcgacgcctgacttattataataagcgcaagggtaaacgttccttgcgctttcttaaattaagaagtcgcaatgagtattactttgtaaattgcagggtattgtttagctatctgtataacctgaatgttagtactcattcttcctggtagtaaggcgagattattaaagttgccatgcagcgtccggggaagtgttgggcgctgttttttttgtttcttaataatgtgttgtaagccgtagaaggcgtgtaggtcgcaccctatgcgacctacacatcagtcaggaattacccttcacgttctaccactttaatttccaccatgccgatcccgagcttacgcgggctgtgtccgaggatattcccttcgttggtactgacaggttccggcggcacaattaccagtgtgtcggcatcggttgggttatcgaaatgcagtgtggtggtggtcacttcattgcccagcacaagagtttgttcttcattgcctacgcgtaccggaataggacggctggcgttattgccgtatgctttggcggtaatcaccaggtcaaatttcttcggcagcggatgcttgtactcgatttttacttcatcgcccagctgcgcgttggaccagcggccccagctctccggacgggaaatcccgctaaactgtttcacctcttctggcgcaccggcgacgttaaagatgaaactgtcggctttgtagcgaatatcgttatcaacaatcttcagcgtatcgacattgcctttgtaacgcgccatgtcgatgaccgtatctttaaatgccgttttgccctgccatgttgttttgtcaacatgctgaacaatttgctgaccgccaagctgcccttggctgacacaccagtcggtggaaagtgccagttccggagcccagagttgtgccatcttgtagcaacggtcaacccagacgaaattgtcgcgtggagcgaaatcggccagctggaaacgcagcggtgcactgtattcgctttccggcagcggttccacgcgtttgtcactaacccgcaacagcagcggcaaacggaaatggctaccgctgaaggcaatcatgtttttctgctggtcgatggtgaactctttcatctctttagggaatttccacaggcggatgatatctggcttccacgccaatgttttctctttgatattgaggaagatttcgctcatgctctgcccggataaactgctacgaccaagtccgagatagttatcgccaccgagaatgtccagcaccgtcgcgccgttatccatcgtgttacgcttcactgccagcgtctcttgctgcggcttgtcgccacgaatgacaaaaaacaggttattgcgatcctgcttattgaggtatttccacgccgtgttgttcatcgctaaatggtcagaagagacgacgatgacggtatctttaaaccacggactcgctttgattttgttgataaacgtcgcgatgttctcctggctgcaacttaccgcgctgaaactctgattcggtttaccgtcaaaatcatattttttgcggttacaggtacgagagataaaaccatccgggtgatgggtatcgactgtcagggtaaacagactgaatcgctgaccactgcgggaaagctcttcaaactttttccacgcttcatcgagaacggtatcgtcgtagaatccccagtcgttgcgatagtgcgggtcggctaccacgcttttcagctcttcactgccgtataagtggtcgaagccatggctcttcaggaacacatctttaccggcaaaacgcagattcgcgccctgcacgaaatagttctgataaccgctgtttttcaggatatctcccagacagatgttctgcgggaagaagctggagacagaggcggaggcgttgccttcaaagggggcaaacagcggtatgccgcactgagaagccaccatgcccgcaatcgtgtaatctgttcccggcagctgctgcgtgtggctgaaatccaggccttcatttttcaacgcgcccagttcaggcgtgagatccgggaaagcctcgttatcaaaataggtccgctcgagactttcgccgtagatataaaccaggttgagtttcgggtcagggatagttttgctcggctctttataataagccgcaaagtccgggtcgccgtcgcgactctgggatttcaccagttccgttatctgacgaaatgccgggctggcgtccacgctacccagcgccagtaagagcgccagcaggctgtaaccaaaatggtgcggatgatggcgacgacggcgcaggatccagcccagcgcaccgaacaccgctgtcagccccagcacaatgccgatacccggcaaaatgtatttgctgacgccagcaccggtcaggctgttggttaaggtatagagaaccgcgtcgttaataccatcgccagtaaaatagtcgctggcaaacagggtgatatttaaaacgacaaatagccccagcaccgttaacgtggctgcaaaccaccaggtgttacgtcccgctttccatgcgtaaatcagcacagaggcgagaaaaagggcgaaagagagtagttcactcaacgggcgatcctcactaaaccgggccgtttagccaacgtttaagctttttgagaagcacaatgtaatggcgtcgccatattgctgcaattctagtgtcaaaaaaatgcgatgttgttaggaattagtttataaacagacttttttgattacggtcacttcccgtgtaacaggggtaaaaccgtccaggagcagggaaaagggcaggagagagccgcgtcagccgggtaacagctaaaacgcggcgtttcgcggttcaggaaatgaagttcagcccctgttttaacaccagatcgcaggctttggttttcaccttttctgccagcggagttgttccgatgttatccagattgagttgctgaccatctttggttttcagcaaaccctgaatgccgtccagatagttggtgtcttctttttgctcttcactgttcaggcccagcttttccagcacctggttcttgatgttttcggcatcggttacgctcgccagcttttgcttcgcgcagtattgcagaatgcctgcggcattgttcatgttatctgcgcttaaggcctggtttccgctgctaagcaagttagttaaactcgcgaggctccaaccgccttcctgtgtcgtgctgttttggttgccaagttcgctggcggcgctggagagcgcatctttccaggacgcagcatgcaccccggtggaaattaatgcgctggcggcaatggcacagcacagaagatgtttaacagttttcatcatcattactcaaggtggaattgtgtcgcagtataccgccagaaacggggattaatactctttacctgttacccggctacggtagctatcccagttgaagatcacccacaaactgttacccaggcgcatacggtccatcacgcgttcgcccagcaacttggtcatctcttccatattactgttggtcagcatcccggttgggcgtttggaagaagagcggcgatcgacgatctggttgatgatcactttttcgtatttgctttcggtctgcacgccgatctcatcgatcaccagcagatcaacgttgctcagatcgttaagcagttgttcttcgctggtaccgctattcctgaaggtatctttcatcgcgctcataatatcggccacggtgatgatcaatacggatttaccgcgtagcagcagctcgttgcagattgccgccgccagatggtttttgccggttcctggcttaccagaaaagatgaagctggcgatgttgccgtcaaactcttcgacatactggcgcgctttgcttaacgcattcatctgcccttcacactcaacgcgatagttctcaaaggaacagttctgatgcagtggacgaataccggagcggttaaaggtgcgctgcattttcatcgcccgattttcacgttcgagagcggcggagcggatcgctccttgttctttttgccaggccagtagttcttcacccgttttgaatgcgggtttgatatgggcaggcatcattttttgcaggcgttgcatcaggtcgccaacgtttttcatcgttaccctctgaatcctggtggaatttggctgtcaggttcgctgaccgtattcacatctcgtttcggcagtccgccgttgctggcacgaccgatttgcaggctgcgcgccagtttttgttgccactgcacatggtgaaagactttaccttccgcctgccagtaggcaatgaaactggccagttcttcggtggtcaccggctctcttagcgccacgccccatagcgccgccaggcggataaaatcggcatcgggttgccagtccggatacatggcgaatttccccatgggtacagcaacgggagcggcttgcggttcctgatagagttgatcgtccagagcgacatcgcttcccggacgcgccagcttttcttccagcgccagcagttcagccaggcgtgcaggcgtgacggcataaaacgccggggcattgttagcaaatacggcaaccacaccgccttcagcttttgccagaacggtttggtgatcgtgtaccagggcgtcaataccaacgacgtccggggtcaaaactctggaagacatactgtttctcaaatatggaacgatgaacgagaagggagataacttttatagtaacacacggaggagaggaggctgtctctcatccgtgtgcttaagcgaggcaattttatacgcgagggcgcttgcggtacaaccataatccaggaatggaaagaccgatggataacgcaccaacaatgctactagctgtaagaaagttggttaacagggtaatcatcaacggttcgctgtaacctaactggctgatttttaccgcgctaatcattgcggtataagcgcttatgcccgggaacatagggataacggccgccacggtaaacactttcggatgcgccagataccagcggctccattgaataccaatggtaccgaccagcatagaagccataaaggtactccactcaatattcaacccgctggtcatcaagatcattcgggaaccatgacctatcgagccaagcagcgcacaccagcgtaacgcccgcacgggaacgttgaacaccatcgcaaagccgaccgcaggaatggcggcgaggatcatatcctgcgccaacgctaacagaaattcgatcacacccatccgcgtagcccccaaatcgtcagtgccatcactacgccgacgcaggtagccagtgtcagcagactggcgatcgcccagcgtgccagtccggtattgatgtggcctttaaacatatcggcgacggcattaatcaacggaaagcccggcactagcagcagaacgctggcggccatcgcaatggtgggggtattgctgaaagtggggagttgcaaaagcaatccggaaatggtggtggcggcgaaagcggtaaggcaaaagttgatctgtggatgaagatgacgttgtgccagcagctggcggatatacatcgcggtcgtactggcaaagaaggtgatgacggcaccatcccagccaccgttattgagtttacagaaacaggcgcaagaaaggccaaccattaaggctaccagccatcttgggtaacgtaatggctgaatttggctaaatcgtttctctacgcctttgtaatccagcagatgatgctccgcaagaatcacaatgtgctggacttcagtcaccacatgcatattaatgccgcgatcgtgatttttacgtgtgcttgtcaggcattgcccatctttaatagttgtcagcactatggcgttgctagagatagaactttcgacgctgtccattcccagtgcccgacccagtcgactggaaagctcatcaaccaacgcgctttccgcaccatgttgcaaaagaaataatccacactggatacaaagccgtgttacggctcgctgttgctcagtttgcataactcgccctttgtcatagacgtgctgcgtattgttcagataatgagaatccatttgtatcatgaagcacggttgttttgcggtaggttaagatcaaaattgcgctgattaatcctggttatcgggagaagctcggtgataaaaagcgaattatctctcgccgcaaacaaactatcacatgaatattatcatcataatgaatttattgtttggcctttacgaatcaggataatagataaccgggcacgttttttaatgttaacaagctaaaaccatcagatttcattgaataaatattggttgtgtgattttgcattctgcgggaagggatatcatttaattataaattaaatgaatgtgatttctgtttttcattaagtattcctaacaacttaatgtagatattttaaatgtctccaggctatttcaccaggttatcatttgatgctaaccttctgacacatgcagtggagttgttgtgcagcaggagtatgctgatatgaaagtgaatgctaaggataatttattcgcttaatctattaatttgctggaaacatttaaggaatgaatatcctgaataaaccatcataatttttagacagtggatgtggaggaaatatgttgccaggatgctgcaaaaatggaattgttatcagtaaaatacctgttatgcaagcagggttaaaagaggtcatgaggactcacttccctgaatatgaaataatatccagcgcctctgcggaggaccttaccttattacaattacgtcgttccggattagtcattgctgatttagccggtgaaagtgaagatccacgttctgtttgtgaacattattattctttaatcagtcaatatcgggaaattcactgggttttcatggtgagtcgctcctggtattcccaggcagtagaactgctcatgtgccctacggcgacgttattgtctgatgttgaacccattgagaatctggtcaagaccgtacgttccggcaatacgcacgcagagcgtatcagcgccatgctgacctccccggcaatgactgaaactcatgattttagctatcgctccgtcattctcactcttagtgagcgcaaggtactgcggctattaggtaaaggatggggcatcaaccagatagctagtttgcttaagaaaagtaataaaactatcagcgcccaaaaaaacagtgcgatgcgtcgactggcaattcacagcaacgctgaaatgtatgcatggataaatagcgcgcagggtgcaagagaacttaacttgccttctgtttatggagatgccgcagaatggaacacagccgaattaagaagagaaatgagccacagttaaaaaaatgcgtcatgagtagtatcggtattgagagtttattcagaaagtttgcgggtaacccttataagctccatacctataccagtcaggagagttttcaggatgccatgagccggatcagctttgcggcggtcattttttctttttctgccatgagaagtgagcgcagagagggattatcttgcctgactgaactggcgattaagtttccgcgtacccggcgtttagttattgcggatgatgatattgaagctcggctgattggtagtttgagcccaagtccgctggacggtgtattaagtaaagcgagtacgctggagatttttcatcaggaactctttttgagtttaaatggtgtacgtcaggcgaccgaccgactgaacaatcagtggtacattaaccaaagccggacgttaagcccgacggagagagaaatattgcgctttatgagccgtggctacagtatgacacaaattgccgagcagcttaaacgcaatatcaaaacgatccgtgcacataaatttaatgtgatgagcaaactgggcgtcagttctgacgcagggttgttggaggccgcagatattctgttatgtatgcggcattgcgaaacaagtaatgtgttgcatccctattaatccgcatgatgccgggtttacttccccggcagtgctttcatttcagcgtacaatcgccacattgctgcacatccggtaagcgataacgctggcagcaagtgcggcgcaccagcaggccgtcgcgcagtaccacggtacgccagagtggattatcttcaccgttcgtgagcgttttctcaaaaaagagggcatggcgcaggctttcaacagtagcctcgccgagcagttgcttcatctcagtgagataccagttgatcaaataaccggtattactccagataagtttgccgttgatctctccggtcgcttctagtgcttgcacaaccggaaccagcgcctggctgattaacgtttccattcgatgctgcgggctatgtggtgttgcgtttttatcttcacacacatcgacccagaaacaggcgacgcgtccggtttcgtgaaactcagcatggaaatgttccgggctcacatctaatgccttttcctgcgtcagtagcgccagcattaatggtggcaccatcaggccgatataccattgtgcccatagactgatcagcggtttgttctcgcggatcatcatcggttggttgcgatagatatgatcggaatagaccgccagcagagaacttagcacattcggactactccattgcgccagcgtcatggcgttaagtggggcaggttcatccaggcggataaactccagcaaatgttcacgatgttttgcgatcgtcgcccgcacggcttgcgcaagcgtgggatcctgcggctggagatgcgttcgccagatgacatcttcatagagcggtgcggaacgataggccataatcgggatagtaatctaaatgataatgattgctaatcatagcgataggtttacccgatagcaagggatttatctggcttgcaaatgataaaaattatcatatgatattggttatcattatcaatgaaagagatgaaatcatgttgcaacgtacgctgggcagtggctggggagtgttgctgccgggattgctgattgcggggctgatgtatgcggatttaagcagtgatcagtggcggattgtcattctgatgggattagtattgacgccgatgatgctgtatcacaaacagttgcggcattacattttgctaccaagctgcctggcacttattgctggcatcatgctgatgataatgaatttgaatcagggatgaaaaatcaaggaagaaacaagaaaggaagtaaagataattggtgcgaggggggggacttgaacccccacgtccgtaaggacactaacacctgaagctagcgcgtctaccaattccgccaccttcgcacagtcatcttactttttttgatatcgcctcgtttggtgcgaggggggggacttgaacccccacgtccgtaagaacactaacacctgaagctagcgcgtctaccaattccgccaccttcgcccagtgcgagcaatatcaacgtggtttttggtgcgaggggggggacttgaacccccacgtccgtaaggacactaacacctgaagctagcgcgtctaccaattccgccaccttcgcataccatcaattcttaaaaagaattgctaccacggaggcgcattctagtggttttcagcttttcgtcaatagttaattatcgacagaggtgtaattgctggaaaaatgtccatcaggaaactagcgtgcaggtttggtatgcatgcgggggcagatgccagatgcgacgctggcgcgtcttatctggcctacgaagggctaacgtgcaggttttgtaggtcggataaggcgttcacgccgcatccgacacggtattcggcgagataattaacctttcttcgcctggcgggtcataatggcgcgatacaccttgaagcgccctgtttgcgcgatcacttcgtggaagccaaatgtctcatccagcacgtccggataaggcaggaaggcgttcgctacaattcgcagctcgccgccgctattaagatgacgcaccgcaccgcgaatcagcgtttgcgccgcatccaggctggtttgcatcccatcgtggaacggcgggttggagatgatcatatcaaaacgacctttcacctcggaaaagacgttgctggcaaagacttcaccttcaacaccgttggccgcaagtgttgcgcggctggcttctaccgccggggcagagacatcgcacaaggtgagacgaattttcgggctatggcgcgcaaaggcaacactaagcacgcccgcgccacagccgacatccagcactttacctttcgtgtgcggagttaacgtgctgagcagcaactggctaccgacatccagaccgtcgcggctaaacacgccaggcagcgttttgaccgtcaggccatcgacgctgtattcgccccagaatttctccgcatcaaataccggctgtttttccagacgaccaaaatagaggccacagcgacgagcgctgtcgactttattcaacggcgcataatctgccagcatctgctcggcgctgcgcacgccgctgcggttctcgccaacgacaaaaatatctgtccccactggcagcagagaaagtaaattcatcaactggaactgggcttccggtttgttcttcggccagtagtaaatcagcgtatcgcaatctgcgacgtcatccgccgtggcgaccagactgaaacgggcgttatcccccatctggcggcttaatacctgccagtggtggaattgctgggtatgagcacggctggccgcggtatctaaacgcgcgggcaggtcatcctgtaagtctccggcaaacagaatacggctttgttcgaaatcatcactgtgacgcagcaagacttcacttgccggggtaaatgcagacatggaatgctcctcaattgatactggcggcgattatagccatatgttggcgcggtatcgacgaatttgctatatttgcgcccctgacaacaggagcgattcgctatgacatcccgacgagactggcagttacagcaactgggcattacccagtggagcctgcgtcgccctggcgcgttgcagggggagattgccattgcgatcccggcacacgtccgtctggtgatggtggcaaacgatcttcccgccctgactgatcctttagtgagcgatgttctgcgcgcattaaccgtcagccccgaccaggtgctgcaactgacgccagaaaaaatcgcgatgctgccgcaaggcagtcactgcaacagttggcggttgggtactgacgaaccgctaagtctggaaggcgctcaggtggcaagtccggcgctcaccgatttacgggcaaacccaacggcacgcgccgcgttatggcaacaaatttgcacatatgaacacgatttcttccctcgaaacgactgatttaccggcggcttaccacattgaacaacgcgcccacgcctttccgtggagtgaaaaaacgtttgccagcaaccagggcgagcgttatctcaactttcagttaacgcaaaacggcaaaatggcggcgtttgcgattacgcaagtggtgctggatgaagctacattgttcaatattgcggtcgatcctgactatcagcgtcagggattgggaagggcgctgctggaacatctgatcgacgaactggaaaaacgcggcgtggcgacactatggctggaagtccgtgctagtaacgctgccgccattgccctgtacgaaagtttaggctttaacgaggcgacgattcgccgcaattactaccccaccacggacggtcgcgaagacgccatcatcatggcgttgccaatcagtatgtaatacaaggtggaataatgaagtgggactggattttctttgatgccgatgaaacgctgtttacctttgacagtttcaccggcctgcagcggatgtttcttgattacagcgtcacctttaccgctgaagattttcaggactatcaggccgttaacaagccactgtgggtggattatcaaaacggcgcgatcactagtttacagcttcagcacgggcggtttgagagctgggccgaacggctgaacgtcgagccaggtaaactcaacgaagcctttattaatgcgatggcggaaatctgcacgccgctgccgggcgcggtttctctgcttaacgccattcgtggcaacgccaaaatcggcatcatcaccaacggctttagtgccttgcaacaggtgcgtctggaacgcacgggcctgcgtgattacttcgatttgctggtgatttccgaagaagttggcgttgccaaaccgaataagaaaattttcgattatgcgctggaacaggcgggcaatcctgaccgtagtcgcgtgctgatggttggcgacactgccgagtccgatattctcggtggcatcaacgccgggcttgcgacctgctggctgaatgcacaccatcgcgagcaaccagaaggcatcgcgcccacctggaccgtttctagcttgcacgaactggagcagctcctgtgtaaacactgattgcctcccccccgttgatgggtaaaatagccgcaatttttcgttttcaacaagcgcggcgcgatgccgcttactcaagaagaaagaattatgacgttgtctccttatttgcaagaggtggcgaagcgccgcacttttgccattatttctcacccggacgccggtaagactaccatcaccgagaaggtgctgctgttcggacaggccattcagaccgccggtacagtaaaaggccgtggttccaaccagcacgctaagagcgactggatggagatggaaaagcagcgtgggatctccattactacgtctgtgatgcagtttccgtatcacgattgcctggttaacctgctcgacaccccggggcacgaagacttcagcgaagatacctatcgtaccctgacggcggtggactgctgcctgatggttatcgacgccgcaaaaggtgttgaagatcgtacccgtaagctgatggaagttacccgtctgcgcgacacgccgatcctcacctttatgaacaaacttgaccgtgatatccgcgacccgatggagctgctcgatgaagttgagaacgagctgaaaatcggctgtgcgccgatcacctggccgattggctgcggcaagctgtttaaaggcgtttaccacctttataaagacgaaacctatctctatcagagcggtaaaggccacaccattcaggaagtccgcattgttaaagggctgaataacccggatctcgatgctgcggttggtgaagatctggcacagcagctgcgtgacgaactggaactggtgaaaggcgcgtctaacgagttcgacaaagagctgttccttgcgggcgaaatcactccggtattcttcggtactgcgctgggtaacttcggcgtcgatcatatgttggatggcctggtggagtgggcacctgcgccgatgccgcgtcagactgatacccgtaccgtagaagcgagcgaagataaatttaccggcttcgtatttaaaattcaggccaacatggacccgaaacaccgcgaccgcgtggcgtttatgcgtgtggtgtccggtaaatatgaaaaaggcatgaaactgcgccaggtgcgcactgcgaaagatgtggtgatctccgacgcgctgacctttatggcgggtgaccgtagccacgttgaagaagcgtatccgggcgatatcctcggcctgcacaaccacggcaccattcagatcggcgacacctttacccagggtgagatgatgaagttcaccggtattccgaacttcgcaccagaactgttccgtcgtatccgcctgaaagatccgctgaagcaaaaacagctgctcaaagggctggtacagctttccgaagagggcgcggtgcaggtgttccgtccaatctccaacaacgatctgatcgttggtgcagttggtgtgctgcagtttgatgtggtggtagcgcgcctgaagagcgaatacaacgttgaagcagtgtatgagagtgtcaacgttgccactgcccgctgggtagaatgtgcagacgcgaagaaattcgaagagttcaagcgtaagaacgaaagccaactggcgcttgatggcggcgataacctcgcttacatcgctaccagcatggtcaacctgcgcctggcacaggaacgttatccggacgttcagttccaccagacccgcgagcattaattcttgcctccagggcgcggtagccgctgcgccctgtcaatttcccttccttattagccgcttacggaatgttcttaaaacattcacttttgcttatgttttcgctgatatcccgagcggtttcaaaattgtgatctatatttaacaaagtgatgacatttctgacggcgttaaataccgttcaatgcgtagatatcagtatctaaagccgtcgattgtcattctaccgatattaataactgattcagaggctgtaatggtcgttattcatcactcatcgcttttgtgatggcgaccattgacttctgtagagggtgaagtctctccctattcagcaatgcaacctcgtgttgccaggctcaaattacgagcaaacatacaggaataaatcgatgactatgacaagactgaagattagcaaaactctgctggctgtaatgttgacctctgccgtcgcgaccggctctgcctacgcggaaaacaacgcgcagactaccaatgaaagcgcagggcaaaaagtcgatagctctatgaataaagtcggtaatttcatggatgacagcgccatcaccgcgaaagtgaaggcggccctggtggatcatgacaacatcaagagcaccgatatctctgtaaaaaccgatcaaaaagtcgtgaccctgagcggtttcgttgaaagccaggcccaggccgaagaggcagtgaaagtggcgaaaggcgttgaaggggtgacctctgtcagcgacaaactgcacgttcgcgacgctaaagaaggcagcgtgaagggctacgcgggtgacaccgccaccaccagtgaaatcaaagccaaactgctggcggacgatatcgtcccttcccgtcatgtgaaagttgaaaccaccgacggcgtggttcagctctccggtaccgtcgattctcaggcacaaagtgaccgtgctgaaagtatcgccaaagcggtagatggtgtgaaaagcgttaaaaatgatctgaaaactaagtaattcgtcgtaattcgtcctcccgaactttgtcgggaggcgcgatgtgcaccacactaaaaatatcgcattgagtgattttcacgctcatatcaagcggtgacattaactatggtaaaggagacgcttatgtttcgttggggcatcatatttctggttatcgcgttaatcgccgccgcacttgggtttggtggtctggccggtaccgctgcaggcgcagctaaaattgtctttgtcgtcgggattattctgttcctggtgagtttgttcatgggccgaaaacgaccctaaatttcagaccattaagaaaattttatccaaagccagtccagcggactggcttttgcggttttagcgaataataaattgcgttactttgtcattctttcacaacaaaaacaggaaggcagaggtggggcagcgaatacctgtaacgcttggtaatattgcgccgttgagcctaaggccgttccagcctggacgaatagctctggtgtgcgaaggcggcggacagcgtggaattttcacggctggcgtgctggatgagtttatgcgcgcgcagtttaatcctttcgatctttatctcggcacatctgccggggcgcagaacctcagcgcgtttatctgcaatcagcccggttacgcgcgcaaagtcatcatgcgctataccacaaaacgcgaatttttcgatccattgcgctttgtccgtggaggaaatcttatcgatctcgactggctggtggaggccactgcaagccagatgccgttgcaaatggataccgccgcgcggttgtttgacagcggcaaaagcttttatatgtgcgcctgtcgtcaggatgactacgcgccgaattactttttaccaaccaaacaaaactggctggatgtgattcgcgcctccagtgcgatacctggcttttatcgtagcggagtgagcctggaaggcattaactacctggatggcgggatcagtgatgcgattccggttaaagaggcggcaaggcagggcgctaaaacgttggtcgtcattcgcactgtgccgagtcaaatgtactacacgccgcagtggttcaaacgcatggaacgctggctgggtgacagtagcctgcagccgctggtcaatctggtgcagcatcatgaaaccagctatcgtgacattcagcaatttattgagaaaccaccgggcaagctgcggatattcgaaatttatccgccgaagccattacatagtatcgcgcttggcagtcggattccggcgctgcgtgaagactataaacttgggcgtttatgcggtcgttatttcctcgccacggttggcaagctattaactgaaaaagcgccgcttacccgccatctggtgccagtggtgacgccggaaagcattgtcattccgcctgcgccagtcgccaacgatacgctggttgccgaagtgagcgacgctccgcaggcgaacgacccgacatttaacaatgaggatctggcttgatttgccgttttatcgacacccactgccattttgatttcccgccgtttagtggcgatgaagaggccagcctgcaacgcgcggcacaagcgggcgtaggcaagatcattgttccggcaacagaggcggaaaattttgcccgtgtgttggcattagcggaaaattatcaaccgctgtatgccgcattgggcttgcatcctggtatgttggaaaaacatagcgatgtgtctcttgagcagctacagcaggcgctggaaaggcgtccggcgaaggtggtggcggtgggggagatcggtctggatctctttggcgacgatccgcaatttgagaggcagcagtggttactcgacgaacaactgaaactggcgaaacgctacgatctgccggtgatcctgcatagtcggcgcacgcacgacaaactggcgatgcatcttaaacgccacgatttaccgcgcactggcgtggttcacggtttttccggcagcctgcaacaggccgaacggtttgtacagctgggctacaaaattggcgtaggcggtactatcacctatccacgcgccagtaaaacccgcgatgtcatcgcaaaattaccgctggcaagcttattgctggaaaccgacgcgccggatatgccgctcaacggttttcaggggcagcctaaccgcccggagcaggctgcccgtgtgttcgccgtgctttgcgagttgcgccgggaaccggcggatgagattgcgcaagcgttgcttaataacacgtatacgttgtttaacgtgccgtaagccggataaggcgttcacgccgcatccggcagttggcgcacaatgcctgatgcgacgcttaacgcgtcttatcatgcctacaggtttgtgccgaaccgtaggccggataaggcgttcacgccgcatccggcagttggcgcacaatgcctgatgcgacgcttgtcgcgtcttatcatgcctacaagtctgtgccgaaccgtaggccggataaggcgttcacgccgcatccggcagtcggcgcataatgcctgatgcgacgcttgtcgcgtcttatcatgcctacaggtttgtgccgaaccgtaggccggataaggcgttcgcgccgcatccggcagttggcgcacaatgcctgatgcgacgcttgacgcgtcttatcaggcctacaagtctgtgccgaaccgtaggccgtatccggcatgtcacaaatagagcgccggaaatatcaaccggctcaccccgcgcacctttaacgcatcagccaacggctcaacgtcttccggcgtggcgctcgcccagctttgcgcctcgccatacacgccgtgggcatgaaacgcgttcaggcgtaccggaacatcgccgagtcccttgataaacgccgccagttcttcgatgtgttgcaaataatccacctggccagggatcaccagcaaacgcagttccgccagcttgccgcgctctgccagcaaatagatgctgcgcttaatctgctgattatcgcgtccggtgagttgttgatgacattcgctcccccacgctttgagatcgagcattgcgccgtcgcacaccgggagcaatttttcccagccggtttcgctcaacatgccgttactgtccaccagacaggtgagatggcgcagttgcggatcgtttttgatagcagtaaacagcgccaccacaaacggcagctgggtcgtggcttcaccgccactcaccgttatcccttcgataaacagcactgctttgcggacatggctaagcacttcgtccacgctcatggattgcgccatgggcgtggcatgttgcggacacctcttcaggcaggtatcacactgctcgcaaaccacagcgttccacaccactttgccgtcaacaatctgcaacgcctgatgcggacactgtggcacgcactccccacagtcattgcaacgtcccatcgtccacggattgtgacagtttttgcagcgcagattgcagccctgcaaaaacagagccagacgactgcctggcccgtcaacgcaggagaaggggataatcttactgactaaagcgcatctgctgttcatggcttatcacgcgcggctggcgttccagaatacgagtgttgcgtgcggcttcttcgcccagccaggtggtgttggtgcgactaccttcggcgcgatatttttctaaatcgctcaaacgcaccatataaccggtaacgcgaaccagatcgttaccgctgacattggcggtaaattcacgcattccggctttaaaggcaccgaggcaaagctgtaccagtgcctgcgggttacgtttgatggtttcgtcgagcgtcagaatgtcgctgatgccggaataataataagcatgatgcggggcgacagtttgcagatgggtgatcggatctggctcatcgccatacggcaaacgcgcgcccggcgtggtgccgatatcggaactgatcccgctctgtgcgtgtaacatggcgcgtttttgccagccatatttcacgggggtattggcgacaaactccgccagttgcgcgctgatgcgataacctacttcatttgcggcggcttctttaccgtagcgcgcggcaatcccttctttttcacacagcaagttaaccgcttccgccagcccatacatgccaaacattggcacaaaacgttcagggttaatcagcccttctttcaccaggaagctattctcaaagaagtgactttgttgatagaggaattcacaccgcgcatcgatgatggcgatctgctgctggcagtagtgcggtagagtgcgcgtaaagaagtcatccaggctttcgctgcgctcggcaatggctttcaggttaaggcgtaccagcgtgctgccaccacccgccagcggcagactgttgtaacagctcacaatcccgtagcccccttttgtgaaaattttatcatgcaccggaccgttggcgatgtgcggtttgctacattcacagatgttcttcgccacttccagcagcaggtcatcaggggtgatttcaggatcgtagataaaggtcaggttcggactaacctgcttcaactctgcatctgcacgtaagatcgcgcgggtaatggggctatcagacgggccgatattggcgtgcataaaggcgtctggcagggttctgtcgaggtaacgccagaaacgttttattcgaacatcgatctcgtcttgtgttagaattctaacatacggttgcaacaacgcatccagttgccccaggtagaccggcatgcttgtgacgctcggtacgtggtggtaaagaatggtcagcagagagagtgcgtcatcaagatctttcgcgccttccagctccagccattcggaaccgttcgccagaaaacgggcgtaatcgggtaagacatagcgcggtttgtacggcgcatgaccttcaaacatatcgcagattacaccttcatccagcgcgcggcgggcttcggcaggaagctgtgggtaaggcagattgttttctgcttccagtgccagaaaatggcgcttctgctccgggctaagcactgggctggtgacaatttgctggcaacgttgttgcagtgcattttcatgagaagtgggcatcttcttttccttttatgccgaaggtgatgcgccattgtaagaagtttcgtgatgttcactttgatcctgatgcgtttgccaccactgacgcattcatttgaaagtgaattatttgaaccagatcgcattacagtgatgcaaacttgtaagtagatttccttaattgtgatgtgtatcgaagtgtgttgcggagtagatgttagaatactaacaaactcgcaaggtgaattttattggcgacaagccaggagaatgaaatgactgatctgaaagcaagcagcctgcgtgcactgaaattgatggacctgaccaccctgaatgacgacgacaccgacgagaaagtgatcgccctgtgtcatcaggccaaaactccggtcggcaataccgccgctatctgtatctatcctcgctttatcccgattgctcgcaaaactctgaaagagcagggcaccccggaaatccgtatcgctacggtaaccaacttcccacacggtaacgacgacatcgacatcgcgctggcagaaacccgtgcggcaatcgcctacggtgctgatgaagttgacgttgtgttcccgtaccgcgcgctgatggcgggtaacgagcaggttggttttgacctggtgaaagcctgtaaagaggcttgcgcggcagcgaatgtactgctgaaagtgatcatcgaaaccggcgaactgaaagacgaagcgctgatccgtaaagcgtctgaaatctccatcaaagcgggtgcggacttcatcaaaacctctaccggtaaagtggctgtgaacgcgacgccggaaagcgcgcgcatcatgatggaagtgatccgtgatatgggcgtagaaaaaaccgttggtttcaaaccggcgggcggcgtgcgtactgcggaagatgcgcagaaatatctcgccattgcagatgaactgttcggtgctgactgggcagatgcgcgtcactaccgctttggcgcttccagcctgctggcaagcctgctgaaagcgctgggtcacggcgacggtaagagcgccagcagctactaagtaagatgctttacgcctgatgcgctgcgcttatcaggcctacgagacgtatctacccgtaggccggataaggcgtagacgcatccggcaaaagccgcctcatactcttttcctcgggaggttaccttgtttctcgcacaagaaattattcgtaaaaaacgtgatggtcatgcgctgagcgatgaagaaattcgtttctttatcaacggtattcgcgacaacactatctccgaagggcagattgccgccctcgcgatgaccattttcttccacgatatgacaatgcctgagcgtgtcagcctgaccatggcgatgcgagatagtggaaccgttctcgactggaaaagcctgcatctgaatggcccgattgttgataaacactccaccggtggcgtcggcgatgtgactagcctgatgttggggccgatggtcgcagcctgcggcggctatattccgatgatctctggtcgcggcctcggtcatactggcggtacgctcgacaaactggaatccatccctggcttcgacattttcccggatgacaaccgtttccgcgaaattattaaagacgtcggcgtggcgattatcggtcagaccagtagtctggctccggctgataaacgtttctacgcgacccgtgatattaccgcaaccgtggactccatcccgctgatcaccgcctctattctggcgaagaaacttgcggaaggtctggacgcgctggtgatggacgtgaaagtgggtagcggcgcgtttatgccgacctacgaactctctgaagcccttgccgaagcgattgttggcgtggctaacggcgctggcgtgcgcaccaccgcgctgctcaccgacatgaatcaggtactggcctccagtgcaggtaacgcggttgaagttcgtgaagcggtgcagttcctgacgggtgaatatcgtaacccgcgtctgtttgatgtcacgatggcgctgtgcgtggagatgctgatctccggcaaactggcgaaagatgacgccgaagcgcgcgcgaaattgcaggcggtgctggacaacggtaaagcggcagaagtctttggtcgtatggtagcggcacaaaaaggcccgaccgacttcgttgagaactacgcgaagtatctgccgacagcgatgctgacgaaagcagtctatgctgataccgaaggttttgtcagtgaaatggatacccgcgcgctggggatggcagtggttgcaatgggcggcggacgccgtcaggcatctgacaccatcgattacagcgtcggctttactgatatggcgcgtctgggcgaccaggtagacggtcagcgtccgctggcggttatccacgcgaaagacgaaaacaactggcaggaagcggcgaaagcggtgaaagcggcaattaaacttgccgataaagcaccggaaagcacaccaactgtctatcgccgtatcagcgaataacggtatactgatctgatcatttaaatttgaagcactgagtacggagaacatatgaaacgtgcatttattatggtgctggacagtttcggcatcggcgctacagaagatgcagaacgctttggtgacgtcggggctgacaccctgggtcatatcgcagaagcttgtgccaaaggcgaagctgataacggtcgtaaaggcccgctcaatctgccaaatctgacccgtctggggctggcgaaagcacacgaaggttctaccggtttcattccggcgggaatggacggcaacgctgaagttatcggcgcgtacgcatgggcgcacgaaatgagttccggtaaagataccccgtctggtcactgggaaattgccggtgtcccggttctgtttgagtggggatatttctccgatcacgaaaacagcttcccgcaagagctgctggataaactggtcgaacgcgctaatctgccgggttacctcggtaactgccactcttccggtacggtcattctggatcaactgggcgaagagcacatgaaaaccggcaagccgattttctatacctccgctgactccgtgttccagattgcctgccatgaagaaactttcggtctggataaactctacgaactgtgcgaaatcgcccgtgaagagctgaccaacggcggctacaatatcggtcgtgttatcgctcgtccgtttatcggcgacaaagccggtaacttccagcgtaccggtaaccgtcacgacctggctgttgagccgccagcaccgaccgtgctgcagaaactggttgatgaaaaacacggccaggtggtttctgtcggtaaaattgcggacatctacgccaactgcggtatcaccaaaaaagtgaaagcgactggcctggacgcgctgtttgacgccaccatcaaagagatgaaagaagcgggtgataacaccatcgtcttcaccaacttcgttgacttcgactcttcctggggccaccgtcgcgacgtcgccggttatgccgcgggtctggaactgttcgaccgccgtctgccggagctgatgtctctgctgcgcgatgacgacatcctgatcctcaccgctgaccacggttgcgatccgacctggaccggtactgaccacacgcgtgaacacattccggtactggtatatggcccgaaagtaaaaccgggcagtctgggtcatcgtgaaaccttcgcggatatcggccagactctggcaaaatattttggtacttctgatatggaatatggcaaagccatgttctgatggatttgggcggagcgttgactccgcctttgttatgtcacaaaaaggataaaacaatggctaccccacacattaatgcagaaatgggcgatttcgctgacgtagttttgatgccaggcgacccgctgcgtgcgaagtatattgctgaaactttccttgaagatgcccgtgaagtgaacaacgttcgcggtatgctgggcttcaccggtacttacaaaggccgcaaaatttccgtaatgggtcacggtatgggtatcccgtcctgctccatctacaccaaagaactgatcaccgatttcggcgtgaagaaaattatccgcgtgggttcctgtggcgcagttctgccgcacgtaaaactgcgcgacgtcgttatcggtatgggtgcctgcaccgattccaaagttaaccgcatccgttttaaagaccatgactttgccgctatcgctgacttcgacatggtgcgtaacgcagtagatgcagctaaagcactgggtattgatgctcgcgtgggtaacctgttctccgctgacctgttctactctccggacggcgaaatgttcgacgtgatggaaaaatacggcattctcggcgtggaaatggaagcggctggtatctacggcgtcgctgcagaatttggcgcgaaagccctgaccatctgcaccgtatctgaccacatccgcactcacgagcagaccactgccgctgagcgtcagactaccttcaacgacatgatcaaaatcgcactggaatccgttctgctgggcgataaagagtaattgtgtttcgctgcaaggcgattgccttgtgaagccggagcgggagactgctccggctttttagtatctattcatttttctctccagcttgaatattttcgctatacttttcagtgaaatgtgttaataaatctattcaagtatctattcacgaatctattcattaatgagcgagctgactgatcttttactgcaagggccgcgttctgccccggaattgcgccagcgtctggcaatcagtcaggcgacgttcagtcgccttgttgccagagaagatcgggtgattcgctttggtaaagcacgggcaacgcgatatgcactgctgcgtccttatcgcggaattgagcgtattcccgtctggcgggtggacgataccggaaaggcgcataaattcgccgacatccggttgtgctggccgcagggaagttgtctggtaacaggcgcagatggcgacgaacagtggtttgatggtttgccctggtatttgaccgatctccgaccgcagggctttttagggcgcgcgtggggcaggaagttagccgcgcaactgaatctgactgatgatatacgtctctggcaggaagaagatgtgctctacgccctgaccgtatttaacggtgaatatactggcggttggttggtcggggaggggaattatcagcgatggattactgcacaacaccctgcggaaattcctctggatcaaaaactcacccattacgaacagctggcaagtgatgcactggcaggagaaattgtgggttcttctgcgggcggcgagcagccaaaatttacctactatgcacaaacgccgagtggcaataaacatgtgttggtgaaattcaccgtaccacagcaaaccgcggtcagccaacgttggggtgacctgctaattgctgaatctattgccgcgcaaatcctgcgtgacggtgggatccacgccatcgagagtacggtgcttgtaacaagtaacaggcaggtattcctcgaagcggaacgctttgactgcaaaggtaacgatggtcgcttgcctattgtgagcctggaggcggtgcagagtgagtttatctcttctccgggaagctggccgcaggcaatgcgccgtttgtgtgagcaacaacttgtcactcaccagagcgtggcgcaaacagaagtgatctgggcatttgggcgacttatcgccaacagcgatatgcacgcaggtaatttaagcttttatttatctgaaccgccatttgcgctgacgcccgtctacgacatgctgccgatggtctatgcaccaaacagcgctggaatgctgcgtgatgctgccattgaggtgaagtttgatcttaacgtcagtaaaagcgcttggttaacggcgatcccgctggcgcagcagttctggcaaacggtcgccagagatccgcgtatcagcgaggcgtttcgccacattgcgcaagaaatgccggaaaaaatccggcaaatcgaagagaaagttgcccgcatgggcgggtaattaccttacagcccccgccatccatgcgcttaactcccgtagctctttttcctgttccgggaagtcaaccaacagcgcttcgcactcctgttgcagcatatctgcgcggtacaggcagccttgcagtcgtccggcgagggcttccagcggcgcggggttgaggctgtcggtaaacacctgggcgcgggtgatatggcctttttcaacgtcgaaatgcagttccacgccgccccaggtaaagcgttcatccagcagatggctgaatgccggagcctgaccgaagttccattcccagctactctggcgggcaaaggtttcggcgaagtttggcaagtctggcgttttgttcggggagatgatttccgcttccacgcgctcgccataatgggcgaaaaaggcctcggttatggcctcgcaaacctgctcatgggtgatccccggcaacagctcggtgaggttggtcacgcgggaacgtacgctcgtaatgcctttcgccgccagtttctttttatccggattgagatagtttgccaggcggctgaggtcggcattgagtagcaaggtgccgtggtggaagccgcgatctttggtttcgcgataggcgctgccactgactttgcggtcgccttcgacggttttcaccaccagatcgttacgtccggacgcttcggcgctgacgccgagcgcgttcagcgcattgagcacaatgctcgtggagatagttttatcgtactccggcttgccagccataaaggtaaagcaggtattgccgagatcgtggaacaccgcgccgccaccgctactgcgccgcgccaggcggacgttatcttcttccatccgccgggtattacactctttccacgggttctgcgcgcgaccaattactaccgtgtcggcattgcgccagagaaacagaacgcgctgcgtggcgggcatttggcgaaaaatacactcttccaccgccaggttaaaccacgggtcgtaagagtcagagatgagcaggcgtaatgtggacataacgatttcctttcttgtagtaatgggtcactcttttttctcgctttcttcctcttccggcaccggtttgctggcggttaacaggaaggggctttgctgccagcgggtgcgtttaccctgtagcagcgtgcgggtcagcactacaccgattgccagactgagcagcaacatcaggcgtaaaatgttagtggtgttatccacctgttgggcttcggtggcgagcgtatgggtgtcgagtgtcaggcgcagatagccgagcggtccgtttttacccgcaattggctcgacaatctgctggttaaaatagccgcctgcttttttaccgtcgagcgccagccggtcgcgcacttcgacgctttcgccagaacgtgcgataagatcgccttgttcgtcatacacacccgcgtcgaggatacggctttcatccgttaactgatcgaggatcgcctgaatgcgtttttcatccggactgtcggtacgcatcagcggtgcaacgttcagcgtcacctgacgcgccagggtgcgggccagttcttccagctgtggattacgctgtcgctggtggttttgactaaaccaactcgctccctgcatcagcgccactaacaaggcaagacagaacaggacaatcactgcccgatgcagccggaatttcagttttgtgcgagccatcttccaccctttgaaaatttgagacttaatgttgccagaagcaatggatacaaggtagcctcatgcgttattttccctgcttcgaacgattttacaggagccttaatgcctaacattacctggtgcgacctgcctgaagatgtctctttatggccgggtctgcctcttagtttaagtggtgatgaagtgatgccactggattaccacgcaggtcgtagcggctggctgctgtatggtcgtgggctggataaacaacgtctgacccaataccagagcaaactgggtgcggcgatggtgattgttgccgcctggtgcgtggaagattatcaggtgattcgtctggcaggtagtctcaccgcacgggctacacgcctggcccacgaagcgcagctggatgtcgccccgctggggaaaatcccgcacctgcgcacgccgggtttgctggtgatggatatggactccaccgccatccagattgaatgtattgatgaaattgccaaactggccggaacgggcgagatggtggcggaagtaaccgaacgggcgatgcgcggcgaactcgattttaccgccagcctgcgcagccgtgtggcgacgctgaaaggcgctgacgccaatattctgcaacaggtgcgtgaaaatctgccgctgatgccaggcttaacgcaactggtgctcaagctggaaacgctgggctggaaagtggcgattgcctccggcggctttactttctttgctgaatacctgcgcgacaagctgcgcctgaccgccgtggtagccaatgaactggagatcatggacggtaaatttaccggcaatgtgatcggcgacatcgtagacgcgcagtacaaagcgaaaactctgactcgcctcgcgcaggagtatgaaatcccgctggcgcagaccgtggcgattggcgatggagccaatgacctgccgatgatcaaagcggcagggctggggattgcctaccatgccaagccaaaagtgaatgaaaaggcggaagtcaccatccgtcacgctgacctgatgggggtattctgcatcctcagtggcagcctgaatcagaagtaattgctcgcccgccatcctgcgggcggcacagcattaacgaggtacaccgtggcaaaagctccaaaacgcgcctttgtttgtaatgaatgcggggccgattatccgcgctggcaggggcagtgcagtgcctgtcatgcctggaacaccatcaccgaggtgcgtcttgctgcgagcccaatggtggcgcgtaacgagcgtctcagcggctatgccggtagcgccggggtggcaaaagtccagaaactctccgatatcagccttgaagagctgccgcgtttttccaccggatttaaagagttcgaccgcgtactaggcggcggcgtggtgccaggaagtgccattctgattggcggtaaccctggtgcggggaaatccacgctgctactgcaaacgctgtgcaaactggcccagcagatgaaaacgctgtatgtcaccggcgaagagagcctgcaacaggtggcaatgcgcgctcatcgccttggcctgccgactgacaatctcaatatgttgagcgaaaccagcatcgaacagatctgcctgattgccgaagaagagcaaccgaagctgatggtaattgacagcatccaggtgatgcatatggcggatgtacagagtagccctggtagcgtggcgcaggtgcgtgaaacggcggcttatttgacacgcttcgccaaaacgcgcggtgtggcgattgtcatggtggggcacgtaaccaaagatggtagcctggctggcccgaaagtgctggaacactgtatcgactgtagcgtgcttttggatggcgatgccgactcccgttttcgcaccttgcgcagccataaaaaccgcttcggcgcggtgaatgagctgggcgtcttcgcgatgaccgaacaggggctgcgtgaagtcagcaaccctagcgcaattttcttaagtcgcggcgatgaagtgacctccggtagcagtgtgatggtggtatgggaaggaacgcgtccactgctggtggagattcaggcgctggtcgatcacagcatgatggcgaacccacgccgcgtggcagtggggctggaacaaaaccgtctggcaatcctgctggctgtgttgcaccgtcacggtggtctgcaaatggccgatcaggatgtgtttgtgaacgtggtcggcggcgtgaaggtaaccgaaaccagtgccgacttagcgttactgctggcgatggtttccagcctgcgcgacagaccgctgccgcaggatctggtggtgtttggtgaagtcgggctggcaggggagatccgcccggtgcccagcggtcaggaacgaatctctgaagcggcgaaacacggttttcgccgggcgattgttccggcggctaacgtgccgaaaaaagcgccggaagggatgcagatttttggcgttaaaaaactctccgacgcgcttagcgtgttcgacgacttataatgagatatacggagggagatatgagcagttttgattacctgaaaactgccatcaagcaacagggctgcacgctacagcaggtagctgatgccagcggtatgaccaaagggtatttaagccagttactgaatgccaaaatcaaaagccccagcgcgcaaaagctggaggcgttgcaccgttttttggggcttgagtttccccggcagaagaaaacgatcggtgtcgtattcggtaagttctacccactgcataccggacatatctaccttatccagcgcgcctgtagccaggttgacgagctgcatatcattatgggttttgacgatacccgtgaccgcgcgttgttcgaagacagtgccatgagccagcagccgaccgtgccggatcgtctgcgttggttattgcaaacttttaaatatcagaaaaatattcgcattcatgctttcaacgaagagggcatggagccgtatccgcacggctgggatgtgtggagcaacggcatcaaaaagtttatggctgaaaaagggatccagccggatctgatctacaccagcgaagaagccgatgcgccacagtatatggaacatctggggatcgagacggtgctggtcgatccgaaacgtacctttatgagtatcagcggtgcgcagatccgcgaaaacccgttccgctactgggaatatattcctaccgaagtgaagccgttttttgtgcgtaccgtggcgatccttggcggcgagagcagcggtaaatccaccctggtaaacaaacttgccaatatcttcaacaccaccagtgcgtgggaatatggccgcgattatgtctttagtcacctcggcggtgatgagatcgcattgcagtattctgactacgataaaatcgcgctgggccacgctcaatacattgattttgcggtgaaatatgccaataaagtggcatttatcgataccgattttgtcaccactcaggcgttctgcaaaaagtacgaagggcgggaacatccgttcgtgcaggcgctgattgatgaataccgtttcgatctggtgatcctgctggagaacaacacgccgtgggtggcggatggtttacgcagcctcggcagtagcgtggatcgcaaagagttccagaacttgctggtggagatgctcgaagagaacaatatcgaatttgtgcgggttgaagaggaagattacgacagtcgtttcctgcgctgcgtggaactggtgcgggagatgatgggggagcagagataaccgtgatgaaactgctcaaaggcgaggtataaaatgagtttttttgatgagttgaaaacctctctggaagaggctgtcgagattaaacaaggtttgaaaaaacctgcacgggtgacccgccacgaaattgaggatgctaaggctgttgtagaccggaaacggtgttcacgccgcatccggcattcggtgctcaatgcctgatgcgacgcttaccgcgtcttatcaggcctacagttttacaacgtattgaaattgctggttttgtaggccggataaggcgttcgcgccgcatccggcattttacgcattacttcgcaatacgcttgtacttgatacgcttcggctccagcgcgtctgcgcccagcgtgcgtttcttgtactcttcgtactcggtaaagttaccttcgaagaactcaactttaccttcatcctggtaatccagaatgtgcgtggcgatacggtcgaggaaccaacggtcgtggctgataaccatcgcacagcccgggaactccagcagggcgttttccagcgcgcgcagggtttcgatatccaggtcgttggttggttcgtcgagcagcagcatgttgccgccaacctgcagcagcttcgccagatgcagacgaccgcgctcaccaccggagagttcaccaacgcgtttaccctgatcaacccctttaaagttaaagcggccaacgtaggcgcggcttggcatctcggtgttgccgatcttcatgatatccagcccgccggaaacttcttcccaaacggttttgctgttatccatactgtcacggaactgatcaacgctcgccagtttcaccgtttcacccaaagtgatggtgccgctgtccggctgttcctgaccagagatcatacggaacagggtgcttttacccgcaccgttcggaccgatgatcccgacgatcgctcctttcgggatgctgaagctcaggtcatcaatcagcagacgatcgccataggatttacgcaggttgctgacttccagcactttatcgcccagacgcggtccaggtggaataaacagttcgttggtttcgttacgtttctgatattcggtgctgttcagttcttcaaagcgcgccagacgtgctttacctttgctctgacggcctttagtaccttgacgtacccattccagctctttctcaatgctcttacgacgcgccgcttcttgactagcttcctgcgccaggcgctgatctttctgctccagccaggaggagtagttaccttcccacggaataccttcaccgcggtcaagttcgaggatccagcctgcaacgttatcgaggaagtaacggtcgtgggtaatcgccacaacggtgccttcgaagtcgtgcaggaagcgttccagccaggccacggattcggcatccaggtggttggtcggttcgtcgagcagcagcatgtctggtttttccagcagcaggcggcacaacgctacgcgacgacgttcaccaccggagaggttagcgattttcgcgtcccagtccggcagacgtagcgcatccgccgcacgctccagctgtacgttcagattatgaccgtcgtgagcctgaatgatctcttccagacggccttgttcagcggccagcttgtcaaaatcggcatccggatcggcgtacagcgcatacacttcatccaggcgtttcagggcgttaaccacttcactaaccgcttcttcaatggactcacgcacggtgtgttccgggttcagctgcggttcctgcggcagataaccaatcttgatgtctggctgcggacgcgcttcaccttcgatgtctttatcaatgcccgccataatgcgcagcagggtggacttacccgcgccattcagacccaggacaccaatttttgccccagggaagaaactcagagagatgtttttcaaaatatgacgtttcggcggaacaactttgccgacacgatgcatggtataaacgaattgagccacgttggacttcgcctctatgtttatcgtgataatgagttttcaaaggcgaagtgtagcctttttccccgcctaatcccagccggtcgatcaccctcgcagtaaaagtaaaaaagtgtccgtaacgtggcgtaaacggcaatgactggttagcataaatctattacgcggcatgacgctgcattgatgtatttacacttagaggatgcgcttgtggaaaaagccaaacaagttacctggcggctgttggctgccggtgtctgtctgctgacggtcagcagcgtggcgcgagccgacagtctggatgagcagcgtagtcgttacgcgcaaatcaagcaggcctgggataatcgacaaatggatgtggtcgaacaaatgatgcctggactgaaggattatccgctttatccctacctggaataccgccagatcaccgatgatctgatgaatcaaccggcggtgacggtcactaactttgttcgcgctaaccccacgcttcctcccgctcgcacgctgcaatctcgtttcgtcaatgaactggcgcggcgtgaagactggcgtggcttgttagcctttagcccggaaaagcccggaactaccgaagcgcaatgtaattactactatgcgaaatggaacaccgggcagagtgaagaagcctggcaaggggcgaaagagctgtggctaaccggcaagagccagcctaacgcctgtgacaagttatttagcgtctggcgtgcgagtggtaaacaagatccgctggcgtatttagagcgtatccgtctggcgatgaaagcgggtaacacaggcctggtaacagtgctggcagggcagatgcctgccgattaccagactatcgccagcgcaatcattagtctggcgaacaaccctaatacggtactgaccttcgcgcgtacaactggcgcgaccgattttacccgtcaaatggcggcggtggcgtttgccagtgtggcgcggcaggatgctgagaatgcacggctgatgatcccaagccttgcccaggcgcagcagcttaatgaagatcagattcaggagctgcgcgatatcgtcgcctggcgtttgatgggcaacgatgtcaccgacgagcaggcgaaatggcgcgatgacgccattatgcgcagccaatctactagccttattgaacgccgtgtacgaatggcgcttggcaccggcgatcgtcgcggcctgaatacctggctggcgcgtctgcctatggaagcgaaagagaaagatgaatggcgttactggcaggcggatttattgctggaacgcggacgtgaagctgaagcaaaagagattttgcatcaactcatgcaacagcgtggtttctacccgatggttgcagcacaacgcatcggcgaagagtatgagctgaagattgataaagcgccgcagaatgttgacagcgccctgactcaggggccggagatggcgcgcgtgcgcgagttgatgtactggaatctcgataataccgcgcgtagcgagtgggccaatctggtgaagagcaagagtaaaacagagcaggctcaactggcgcggtatgctttcaacaaccaatggtgggatcttagcgttcaggcaacgatcgccgggaagctgtgggatcatctggaagagcgattcccgctggcttacaacgatcttttcaaacgctacaccagcggtaaggagatcccgcaaagctatgcgatggcgattgctcgtcaggagagcgcctggaatccgaaagtgaaaagtccggtaggggccagcggcttgatgcagattatgcctggtacagcgacccatacggtgaagatgttctctattcccggttatagcagtcctgggcaattgctggatccggaaacgaatatcaacattggcaccagttacctgcaatatgtttatcagcagtttggcaataatcgtattttctccagtgcagcttataacgccggaccagggcgggtgcgaacctggcttggcaacagcgccgggcgtatcgacgcagtggcatttgtcgagagtattccattctccgagacgcgcggttatgtgaagaacgtgctggcttatgacgcttactaccgctatttcatgggggataaaccgacgttgatgagcgccacggaatggggacgtcgttactgatccgcacgtttatgatatgctatcgtactctttagcgagtacaaccgggggaggcattttgcttcccccgctaacaatggcgacatattatggcccaacaaagtccctatagtgcagcgatggcagaacagcgtcaccaggagtggttacgttttgtcgacctgcttaagaatgcctaccaaaacgatctccatttaccgttgttaaacctgatgctgacgccagatgagcgcgaagcgttggggactcgcgtgcgtattgtcgaagagctgttgcgcggcgaaatgagccagcgtgagttaaaaaatgaactcggcgcaggcatcgcgacgattacgcgtggatctaacagcctgaaagccgcgcccgtcgagctgcgccagtggctggaagaggtgttgctgaaaagcgattgattttgtaggcctgataagacgtggcgcatcaggcatcgtgcaccgaatgccggatgcggcgtgaacgccttatccgtcctacaaatacccgtaatttcaatatgtttggtaggcatgataagacgcggcagcgtcgcatcaggcgcttaatacacggcattatgaaacggactcagcgccaggatcaccgcctggtgatagacgctggcgcgagtgagtttcccggcggtaaacacgccgatcgccccttccttacgaccaatctcatcaataccggtataacggctcatcacgggaccaagcgcctcaccttcacgcactttttccagaatcaccgcaggcaacggcaaagtagcgctacgcgcctcgccgcgctggctggcgttttcaatcaccacccaactgaaagtgctgtcaccatcgatgccagcttcaatcgccacccaaaaatcagcctctggaagtaaacggcgggcattggctacccgatttcgtgcgccagcgcgcgtttcctcactgccaaagggctgttccggtacaccgctctcgacggcaacggatgcaatatggcaggatccttcgccgaagatctcgtgaaatgcctgcagaatggcctgaattttagcgggattggtggtcgcacagacaacttggtgcataatcagcattactcagaaaattaacgttacagcagtatacggaaaaaaagcatgttacaggtatacctagtccgccacggtgaaacgcagtggaacgccgagcgacgtattcagggccagtctgacagcccgctgaccgccaaaggtgagcaacaggcgatgcaggtggcaacccgtgccaaagagcttggcattacgcatatcatcagtagcgatttaggacgcacccggcgtacggcggaaatcatcgcccaggcctgcggctgtgacatcatctttgattctcgcctgcgtgaattaaacatgggtgtgctggaaaaaagacatatcgattctctgaccgaagaagaagagaactggcgtcggcagctggtcaatggcaccgttgacgggcgtattcctgaaggcgagagtatgcaggagctcagcgatcgcgtcaatgcggcactggaatcttgccgggacttaccgcagggaagccgaccgctgctggtgagtcatggtattgcactgggatgcctggtgagtacgattctcggattaccagcatgggcagagcgccgcttacgtctgcgtaactgttctattagccgcgtggattatcaggaaagcctgtggctggcgtctggctgggtcgttgaaaccgcaggggacatcagccatctggacgcccctgcattagatgagctgcagcgttaacgacggatcggaatcagcagttcacagcgtagattaattgggcgatctcccgctttggcatcttctgccgggtagtatcgctcaatatcctgacctttacggcgcgtcaggttgagcattggcatgcacgttccgtataccgtcaggataaactcctgcacgccggttcccagaccttcataggtaaacatcacatattcgccgccctgcagcatcaccggatgccccgtcagtacatagccatctgcctgatcctgggctaacgcggtggtatagaatacctcttgctcgtcgtctttatcctgactcggacgcgtttcattcaggccgtagagcaccggcggaatggtcggcgcgttgccgagaaaatcgtgccagaactgataacgcatttcatggcggaaatcagagatttgctccaggctacaggagtagctctgggtaacaccaatcagcggcgtatcttccagggtgacaaatttgtgctctggcatagtgaattcacccaggcgtagcggcgggcgaataccaaaggcgctccattcaggagaacggcggtaaagtgcaggagtctgggcaaactgcttcttgaatgcgcgggtaaatgtctgttgagagtcgaagcggtattgcagcgcgatgtccagaatcggacgcgcagtcaggcgtagtgcgaccgcgcttttgctcaaacgacgagcacgaatatacgcgccaatagcatggccagtgacatctttaaacattctctgtaagtgccacttggaataacctgctttcgccgctacattgtcgaggctcaggggctgatccagatgaccttccagccagattaaaaggtcgcgaataatgccggcctgatccataaaatatcctcatcctttcaacaacgagcacctgacatcaggtaattggataatagcattttttgctgttttagcattcagtgtttttttcttagtagagtatgttttagggcttgacggaaataaaagtattgagattttgttcttaatcaatatgttatttaccgtgacgaactaattgctcgtgtaatagataaaaatggtaacaatatgaaatacaagcatttgatcctgtctttaagcctgataatgctggggccattggctcatgcagaagagattggtagcgtcgacaccgtatttaaaatgatcggcccggatcacaaaattgttgtggaagcctttgatgatcccgatgtgaaaaatgtcacctgttatgtgagccgggcgaaaaccggtggtattaaagggggattgggtctggcggaagatacctccgatgcggccatttcttgtcagcaagtcgggccgattgaactgagcgatcgtattaaaaacggcaaagctcagggcgaggtagtattcaaaaaacgcacgtccctggtctttaagagcttacaggtcgtgcgcttttatgatgccaaacgcaacgcgctcgcttatctggcttactccgacaaagttgtagaaggtagcccgaaaaacgcgattagcgcggttcctgtcatgccgtggcggcaataacagaggcgatttatgcaacgggaaacggtctggttagtggaagatgagcaagggatagccgacacgctggtctacatgttgcagcaggaaggttttgccgtcgaggtctttgagcgaggcttgccggtgctggataaagctcgcaagcaggtacccgacgtcatgattctcgatgttggtctgccggatattagcggctttgaattgtgccgccagttactggcgctccatccggcgttacctgtactgttcctgacggcccgaagtgaagaggtcgatcgcctgcttgggctggaaattggtgctgacgactacgtggctaaaccgtttagtccccgcgaagtgtgcgccagggtgcgcaccttactgcgtcgggtgaagaagttcagcacgccgtctcccgtcatccgtattggacattttgaattgaatgaacccgcggcgcagatcagctggtttgacacgccattagcgctgactcggtatgagtttttattgttgaagacgttactcaagagtccgggccgcgtctggtcccgccagcaactgatggatagcgtatgggaagatgcgcaggacacctacgatcgcaccgtcgatacccacattaaaacgctgcgtgccaagctgcgcgccatcaaccccgatcttagtccgattaatactcatcgcggcatgggatatagcctgaggggcctgtaatgcgtatcggcatgcggttgttgctgggctattttttactggtggcggtggcagcctggttcgtactggccatttttgtcaaagaagttaaaccgggcgtgcgaagagcaacggaggggacgttgatcgacaccgcaacgttgctggcggagctggcgcgtcccgatttgctctctggggacccaacgcatgggcaactggcgcaggcgtttaatcagctacaacatcgcccgtttcgcgccaatatcggtggcattaacaaagtgcgcaatgaatatcatgtctatatgaccgatgcgcagggcaaagtattgttcgatagcgcaaataaagccgttggacaggattatagccgctggaatgacgtctggctaacgttgcgtggtcagtatggtgcgcgcagcacgttgcaaaatcctgccgatcccgaaagttctgtgatgtatgttgccgcaccgattatggacggcagccggcttattggcgttttgagcgtaggcaaaccgaacgcggcgatggctccggtcattaagcgtagcgagcggcgaattttatgggccagcgccattttgttggggattgcactggtgattggcgcaggcatggtttggtggatcaaccgctctattgcccggctcactcgctatgctgattccgtcactgacaataagcccgttcctctccccgatctcggtagtagcgagttgcgtaaactcgcgcaggcgctggaaagtatgcgcgtgaagctggaagggaaaaactatattgagcagtatgtttacgcattaactcatgagctaaaaagcccactggcggcgattcgtggagcggcggaaattttacgcgaaggtccgccgccggaagtggtggctcgttttactgacaacattctgacgcaaaatgcgcgtatgcaggcattggtagaaacgttactacgccaggcaagactggagaatcgtcaggaagtcgttctgactgctgttgatgtggcggcattattccgccgcgtcagcgaagcgcgcaccgtgcagttggcagaaaaaaaaatcactctgcatgttacgcccaccgaggttaacgttgctgctgaaccggcgttactggagcaggcgctgggaaatttactggataacgccatcgattttacccccgagagcggttgcatcacgctaagcgccgaagtggatcaggaacacgtcacgcttaaggtgctggataccggtagtggtattcctgactacgcgcttagtcgtatttttgaacgcttttactctttgcctcgtgcaaatgggcaaaaaagcagcggtctggggttggcgttcgtcagtgaggtcgcccgtttgtttaacggcgaagtcacgctgcgcaacgtgcaggaaggtggcgtgctggccagccttcgacttcaccgtcacttcacataacttcaaattcttcccacatagtcttcgtatcctgctgccattgcaaaggagaagactatgttgaaatcccccctgttctggaaaatgactagcctgtttggtgcagtattgctgttgttgattccgataatgctgattcggcaggtgattgtcgaacgtgctgattaccgtagcgatgtggaagatgcgattcgccaaagtaccagcgggccgcaaaaactcgttgggccgctcatcgctattcctgtgaccgagctttatacggtgcaggaagaggataaaaccgtggagcggaaacgaagttttatccatttttggttacctgagagtttgatggttgatggcaatcagaacgtggaagaacgcaagatagggatttataccggtcaggtctggcacagtgatttaacgttaaaagccgatttcgatgttagccgtcttagcgaactcaacgcgccaaatatcaccttaggcaagccatttattgtgattagcgtcggggatgcgcgtggtattggtgtggtgaaagcgcctgaagttaacggaacggcgctgaccattgaacccggcaccgggttagagcaaggcgggcagggcgtgcatatccctttacctgaaggggactggcggaagcagaacctgaagctgaatatggccctgaatttaagcggtaccggcgatctttctgtggtgcctggcgggcgtaatagcgaaatgaccttaaccagcaactggccgcatcccagttttttaggtgattttctaccagccaaacgggaagttagcgagagtggttttcaggcgcactggcaaagcagctggtttgctaataatctcggtgagcgttttgctagtggcaatgataccggctgggaaaacttcccggcgtttagcgtcgcagtaacgacgccagccgatcaataccaattaactgaccgggcgactaagtacgccattctgctgattgcactgacttttatggcgttctttgtttttgaaacgctcaccgcgcaacgtttacacccaatgcaatatttgctggtggggcttagtttggtgatgttttatttgctcttgctggcgctttctgaacataccggttttaccgtggcatggataatcgccagtctgattggggcgataatgaacggtatttatttgcaagcggtattgaaaggttggtgcaacagcatgttgtttaccctcgcgctgttgttgctggatggtgtgatgtggggactgctcaactctgccgatagcgcgctgttgttgggaaccagtgtgctggtggtggcgctggccggcatgatgtttgtgacccgtaatatcgactggtatgcgtttagtctgccgaaaatgaaagccagtaaagaagttacaacggacgatgagttacgtatctggaaataaggttgaaaaataaaaacggcgctaaaaagcgccgttttttttgacggtggtaaagccgattaatcttccagatcaccgcagaagcgataaccttcaccgtgaatggtggcgatgatttccggcgtatccggcgtagattcgaaatgtttacgaatacggcggatcgtcacgtctacagtacggtcgtgcggtttcagctcacggccggtcattttcttcagcagttcagcacgggactgaattttgcctgggttttcacagaagtgaagcatggcgcggaactcgctgcgcggcagcttgtactgctcgccatcagggccgatcaagctacggctgttgatgtccagttcccaaccattgaacttgtagctttcaacgctacgacgttcttcgctgacagtacccagattcatggtacgggacagtaggttgcgtgcacgaatcgtcagttcacgcgggttgaacggtttggtgatgtagtcatctgcaccgatttcgaggccgagaattttatcgacttcgttgtcacggccagtcaggaacatcaacgcaacattcgcctgctcgcgcagttcacgcgctaacagaagaccgttcttacccggcagattgatatccatgatcaccaggttgatgtcatattcagagaggatctgatgcatttccgcgccatctgtcgcttcgaaaacatcatagccttccgcttcgaaaatacttttcaacgtgttgcgtgttaccaactcgtcttcaacgataagaatgtgcggggtctgcatgtttgctacctaaattgccaactaaatcgaaacaggaagtacaaaagtccctgacctgcctgatgcatgctgcaaattaacatgatcggcgtaacatgactaaagtacgtaattgcgttcttgatgcactttccatcaacgtcaacaacatcattagcttggtcgtgggtactttccctcaggacccgacagtgagtaaaacggctgtcatcctaaccattttaacagcaacataacaggctaagaggggccggacacccaataaaactacgcttcgttgacatatatcaagttcaattgtagcacgttaacagtttgatgaaatcatcgtatctaaatgctagctttcgtcacattattttaataatccaactagttgcatcatacaactaataaacgtggtgaatccaattgtcgagatttattttttataaaattatcctaagtaaacagaaggatatgtagcattttttaacaactcaaccgttagtacagtcaggaaatagtttagccttttttaagctaagtaaagggctttttctgcgacttacgttaagaatttgtaaattcgcaccgcgtaataagttgacagtgatcacccggttcgcggttatttgatcaagaagagtggcaatatgcgtataacgattattctggtcgcacccgccagagcagaaaatattggggcagcggcgcgggcaatgaaaacgatggggtttagcgatctgcggattgtcgatagtcaggcacacctggagccagccacccgctgggtcgcacatggatctggtgatattattgataatattaaagttttcccgacattggctgaaagcttacacgatgtcgatttcactgtcgccaccactgcgcgcagtcgggcgaaatatcattactacgccacgccagttgaactggtgccgctgttagaggaaaaatctagttggatgagccatgccgcgctggtgtttggtcgcgaagattccgggttgactaacgaagagttagcgttggctgacgttcttactggtgtgccgatggtggcggattatcctagcctcaatctggggcaggcggtgatggtctattgctatcaattagcaacattaatacaacaaccggcgaaaagtgatgcaacggcagaccaacatcaactgcaagctttacgcgaacgagccatgacattgctgacgactctggcagtggcagatgacataaaactggtcgactggttacaacaacgcctggggcttttagagcaacgagacacggcaatgttgcaccgtttgctgcatgatattgaaaaaaatatcaccaaataaaaaacgccttagtaagtatttttc
